United States Patent Application Publication US 2022/0008368 A1 - sequence listing, part 12

SEQ ID NO: 2 - DNA, 58617616 bp, Homo sapiens (residues 23,881,254-26,052,276 of 58,617,616)
  modified_base (1)..(60000): a, c, t, g, unknown or other
  modified_base (24448981)..(24498980): a, c, t, g, unknown or other
  modified_base (24552653)..(24552752): a, c, t, g, unknown or other
  modified_base (24891257)..(24891356): a, c, t, g, unknown or other
  modified_base (24895791)..(24895890): a, c, t, g, unknown or other
  modified_base (24898314)..(24904771): a, c, t, g, unknown or other
  modified_base (24908590)..(24908689): a, c, t, g, unknown or other
  modified_base (27190875)..(27240874): a, c, t, g, unknown or other
  modified_base (58607617)..(58617616): a, c, t, g, unknown or other
aggaggagaaggagtaggaggatagaaggaggagaaaaagaggagaggagaatgaggagaaagaggaggagataagaagagaaggagtgagggaggagtaggagaagagaagtaaaaggagagaagaaggaagagaggagaagaaaaaagagaaaaggaggaagagagaaggaggagtaggagaggaaaaaagaataggaggaggaagaagaggaggggaggagaagggggaggagggaaggggaagagaagaagagaagaaaaaggagatggaggagaggagaaaaaagaaaaaggcagcgagaagaaggagaagaggagaagaaggggaggaggatgaaggaagaaagaaagggaggaagaggagagaagaaaaagtaggatgaagagaaggaggaggtgaagaggagaaggaagaaaaaagaaagaggaagagagaagaaaagggggagaggtgaggaggaggagaaaaggagaaggagaggaggagaaaaaggaaaggaggaagagaagagaaggttaggaggagagaaagaaaaggtgaaggagaggaggagaaaaaggataagagaaggaggaagaggaggggaggagaaggaggaggaagagggggaacaggaggagagagaaagaaggaggtggaggagaggagaaaaagggaaaggaggtggagaggaggagcggaggaagaggaggaagaaaggagaaggagaaaaggaggaagaggaggaagaaaggagaaggagaaaaggaggaaaaggaggaagaggagagcagaaggaggaagagaggaggaggagtggaggggtaggaggagaagaggaggaggaagagagaagtaggaggaggaagaggaggagagaaggaggataagagaagatggatgagaaaaggaggagaggaagagaaaaagaggaggaagaggataggaggaggcggagaggagaaggatgagtaagagaggaagagaagagaaataggaggaagaggacaggcggagtaggaaaaggagggaaggaaaaggagtaatagaacaggaggaagaggaggagaagagaaggaggagaagagaaagaggagaagagaaggaggaggagaagagaaggaggaggagcagaggagaatatggaggaggaaagaaggagaagtagaaggaggaaaagaggagaaaaaaggaaggaaaaggaggaagaggagaggagaggagaaggaggaggagagtaggaggaggagaagaggaggaagaggaggagaggaggaggaaaagagagggagtgcctggtctgtcccacggaccctggctgagcaacggatgaaaggagtactcagacacaggtacacagtgttagagcaactaggggtctgcctggctctagtggccaaagtgcagccccaagaagcttgagctgcttgcttttgttcagtgcaggcacaatgccaaaagccttgagcaaacacagtctgtagataattaacaattattgtttccatttcagggaacgtcacacgcgaggatgttcagaggtcagttcagggacaacttcagacaaacaagcctgatcaagacaacttattcctcactcttttgaacatacttctcaccctattcttcagggttagagaacagcagtcttcagctattctctcccaaagctactcaaagtcttttgacctttcagaaggcctgctcccttcttctacagtttttcccaccactctgactgacctctcacatctccccattttctgtttttttttttcatcaggttttgttgattgaagagtacagatgtgtgcagcaacaggtttgacaggcgcagctgttacagcttgtgttttggctttgcatgctagaattagtaaataacataagataaacatgagtataatcagtaatattctttcccaatcaaagagtgacccgcaggaatggggatctatccaggagagatgtttttgcacattgttatatagggctgttaatgagaaaccccaccatgggtatgttaatctcttctagccaggtagtcacattgttaaaagctgggaaaggggtgtctgcccaggtaatagggtggaagaaaggtggatctagaaggtgggcctaatagagtgtagcaggtatgggttgcaggcagagtgagagaataagaaaaactaataccctacaagagttgcaatgtacaacagacagcatagcaaggaagattatctggagtgaatggtgtttttgtctggagcagaatttgctcagtctcctgagttgtctttttcagcataatgtccagggcctgtattgtctgaggaagccacatcatctggggctgtgggtccagcagggttattttatttttggtaccaggtttggtttcagccacatcgtagtatgacttgatgcatcacactagaatccaaagaggacctgagggaaagtgaacacaagcatatcatcttcccctgttaacaaatcatttggaccacaccatacattactatttacatctttccataaaattgaaggttttatatcttgaatgatttttgcaaagtgctttattatagctgattgaaatttatcatctaaatttaagaaattaagggtaaataaggcttgtgccaatagtattgcagggttgttactcatatcccaccttttttgttttctgagcatatttttaagggtggagtgggcacgttctactatggcttctccttgggagatatacaagacacccatggaatgttggatgttccatttgtgacaaaattgttgaaattgtgagctggtgtaagctggaccattatcagttttaattttttgggccaccccatgaatgcaaaagttaaaagaagaggtttaacgacatatcgggcagactctccgggaagagcaggagtgccaattagatgggaattggtatcaacggatacatgtacatatgttagtttttcaaattcagggacgtgcataacatctgttttccatatctgattaggttctagtcttctagggttaacatctgttgaaggaggggatgtgcctgtgagagggcaatctgggctttgtaaaataatttgtatagctagtttttgggtaagttaaaattgttaagtttctccaattttgctgaaaaaattgatgtgattgggtggcttggtcaagcagtgacatcataacctacaggtctgcttgatcttaggtgtgaactagtggactggacagtgagctgtgggcccgaatctttgtaataaaaataggatgtgtttgttgaaccagcaattgctgaagttggaaaaaaaggacacacagggtgagctcaacagtggacttaatgaaggctgtttcaaggttttgcaataaataaacaaagtagtttatcagtgggaaaggtgcatgttctctttctttttctttttctttttgagacagagtcttgctctgtagcccaggctggagtgcagtggcacatcttggctgactgcaacctccgcctccagggttcaacaaattctcctgcctcagctgtccgcgtagctgggaatataggtgtgtgctaccacacctggctgttttttgtatttttaacagaaatggggtttcactgtgttagccaggatagtctcgatcttctgacctcatgatccaccggcctcggactcccaaagtgctgggattacaggtgttagccaccgcacccagctgagaaggacatgttctatatggcccacataatcagagagttctatctgaaggtatagaggtagggggatgactgctttgaattgctttttacttaagggtattcttacgaaatccaggtcataaccttgcaattgattgcaattgattgactttactactagatagacacagggagatggtattttagtcctggtatgtgagcaaagaacccattctaggaggtgcagccttggggccatctgtcttattaatcctgttggggaatatttagtaggaaatacaaataattggacttaatatcatgggtctatgcaatctagtagcctctgagtaatagcttgctctatttcctcaattttcctttttgcagtggggggtcaaatacctgggtgagtccaagtctgcattgccctttaggatagaaagtaggttctgtaacttatcagtagttatgcccgaggtggggcaaagccagttaatatcacccagtaatgtttgataatcatttaaggtgtgtaagttgttagtattcattcaaccttttgaggtcttactgaccggaaagttagtatgtattcaagatgtttccaagggaaggacatcagtaccttctcaggtactatgattaaacatctaaactgtgtattccttttgacagaggcatataaactcaaaagtattggctccgttggggctgccagtaagatgtcatccatgatcttgcaattaggaaattcttttctactggggagaaaatcctgatttacatgatactgacacatggtaggactgttcagcattctttgaggaagtactttccaatgattcagcaagctggcctttcattatttataactggtattgtaaatgcaaatttttctttgtcttattctgcaaggggaatagtagaaaaggagtcttttaagtcaataataactataggccaatctcaaggaactgctatgggggaagggagcccctgttgaatgggccccataggttgcaaattaacattgatagcaagtaagtcatgaaaaagtctccaattattagacttcttgtcaatgatggaaacaggtgaattccaatagctgtttgatggttctatatggccagcttttaaattgttcctcaactaattcatgggctccttgtaatttctctccctttaaaggccactgttctagccacataggattttgagagagccatgtcagggtaggggaaaaatcaaaacagtggccattaccagaaaggggtctgatattacctcaattaatcctctcataaatgggctagtggctccattttctctaatactttttcttatttcttcataagtgttgaaagcaatgagttcatgtacccaattgccttattgatctcccatcaccaagcaggcccagagctccccttctaatgctgtttgcctaaggcgtggccccataactttagtgtttccctttcattctacccaatttattggagaagggggctcagagaaaatctgtgtctcatctgtggcacctttacctggtaacagtggggctgagggagcaagaggagatattaaggtagatgatggttcttcctcccttcccttttaaggctcttctgtgtagagtggggccagagcagccctatctaaggcccataacattaaagatgctactgggacctgttgtccttgtgcaatttaagattaaatgacaagaatgtcatttaagatttcttctcacttgttcccagagctctaggtctagtgtaccatcttctgggaaccatgggttatggaaaacaatagtttgcattaggtcccttaattggggctccaagaccaaggctctgctagctttaagaagctgtttcaatatctttatatactgttgctgttgagtgaataactgttgttcatttttgagggttttgtcatgatccattgctctgttcctcacacagggcaccaccaatagcctttatagtctcagccatagtcatcctagccactgctagtgttgctgttgcatctattactgaatcagtacaaacagctacctttgtggatagcctggccagatatgtgtctaacgaatttctcctacagcagggaatagatcaaaaaattgttgcacattggcaagcccccaaggctgccttggagtatgtaggaaaataacaagatgtactggcattctgacagcaataatattgggaacataagcatatttgtgtcacctctctaccatggaatcgatcaatacaaagttgggatgaggtgaaacaacaactctgtggaaccttacatgataatgtaacagcagacgtaaagcaacttaaaacaacagttctagaatccctaaacactataaatctacacacccaacaagcagccatatggaaggatgtgcaagaacatctctcctaatagaccccctctcctgggggaccctccactccttgattggaaaagaataatactgattatattcatatttgtcttatgttatttagtaattctaggatgcaaagcctgaacacaagctataactgctgcacctgtcaaacctgtgcctgcacatctctgtactcttcaatcagaaaacctgaggcaaaaaagggggaaatgtgggagatcgatcacagtgatgcaagaaactatagggaaaagaacaggccttctgaaaagttggaaggctctgcatagctttggggtacaatatctaaaggcagttgttctctaaccctgaggcagagggtgaggagtatatgcaagggagtgaaggggaagttatcttgatcaggcttgtttgaagttgtccaggaactgacctttgatcatccacactggtgatgtttcctgaaaggggaacaataaacgttaattaccggattgtgtttgctccaggcttttggcattgtgcctgcactgactaaaagcaagcagcttgaacttctcatgactgaactctggccacttgagccagatagtcccctagctgctcttacaatgcatatctgtgtctgagtactcattttatccatcggcaagggtctgtggggcagacccgcactcgccctgtcacccaggctcaagtgcaataacatgatctcggcacactgcaacctccacctcctgggttcaagtgattctcctgccttagcctctggagtagctgggattgcaggcatgcaccaccacacccagctaattgttggtatttttagtggatacagggtttcaccatgttgaccaggctggtctcgaaatccggacattgtgattcacccacctcagcctcccaaattcctgggattacaggcatgagccaccatgctcagtgggtaatattgccttttttgcttgggctgtgcccttagaaggcattgagacatactgctgagcccaccactaacatgatgtgagttctctgcctacccctgaccacaggaagcattgtgacatatttcttgacccattacaatctctcctatgagcaaagctcaggtaaatgccctttttacctatgtgacgtgacatttctcttctgcctgggccatgcccacagattagagagtgacttactgctgaagcaagaaaaacagtgatgtaattattctgcctggtccctgcacacaggagtcactgtggtatatgtttaggcctcccacctagatgatgtgactcttttcttctggggtttgtcctcagtgggaattctgatatgacacgacatagctcctatgagatgtgactcttcctcatttttagcttcttctcactggggtgataggaacataaagctaagccaagcacctaggctatgtctctcctcttatttaggagccctacccacaagggacattgtgacatagctctaggcttctcaccttggtaatgtgactttgtgcctaggccctcccctcaggggtactgtgaaatactgctggaccaagaacctaggtgatgtgactctctgttactgcttggagtgtgcttaagaagaaattgtgggctgggtgcagtggctcacacctgtaatcccatcactttcggaggccaaggcaggcggatcatgaggtcaggagattgagaccatcctggctaacacggtgaaaccctgtctctactaaatatacaaaaaattagccaggtgtggtggcgtgcacctgtaatcccagctactcaggaggctgaggcaggagaatggcatgaactcgggaggcagagcttgcagtgagccaatattgcaccactgcactccagcctgggcgacagagcgagactccatctcaaaaaaaacaaaacagaacaaataaaaaaaaaagaagaaattgtgatgcacatttatgtgcatccagcacctgagtgatgttactctcctgtccttcatgagacctgcatgcatcatgtatttcaacatatctgtgggtctaacaacatggtgatgtgactttcctgcatgggctctcacacagaaatattctaacacaagtttttatttattatcttggtgatgtgacttttcttttctgcttgagcactgccaaaagaaaagattgtgacaaatcgctggacccagcacctaggtgatgtgaatctcttcacttgcctgagaggtgcatattttggttattgtgacatatcactgaaacaaacacgtaggggttggaaggcttctgcctgagccccttccacagagggccttggaatatattttttttatccatcgctgggagatgaaaccctctacttctacctgcattcttcccatagagaagatggtgatatattgctgggcccagcaaccaggtgttttgtctatcttttctgggctttgcctacagtgagccttgtgatatatttagctgagcccagcacccaggtgatcgtactcttcttcctgtgccctgctttcaggagaggattgtaacatctctggttgaagaccctgtgatgtgactctcctgcctggtgcatactctcaggaaagattgtgacataaccctggcccaacacacagttggtgtgaccctcgtgcttgttctctactcacaggtggaattgtgacatataacttggtcaagcacacagatgtaatgatgactttcaacctcgaagagccagtaggagagataacgttgctcatagctacttttaggaaaacaaaaaatcctgggttttccttctgtaaaaatgtcatagagaattaccactctctcacatatataaggccccagtgtgtcacagacaatgtcataacagagttcaccatacagatgagattgtgtttgtcctatgcacagcccagcaacctttagaattgtcaccatcacacatggacagagcccactggtggggccctgaatctcacatgaatgcactccacagttggaactttgtcatatgtgaacatctggccacagttgagatggtgactcatttcttttcttttttttttttaagtgccaagttattctttttttttaaattttttttttattatactttaagttttagggtacatgtgcacattgtgcaggttagttacatacgtatacatgtgccatgctggtgtgctgcacccactaactcatcatctagcattaggtatatctcccagtgctatccctccccccctccccccaccccacaacagtccccagagtgtgatgttccccttcctgtgtccatatgatctcatttttcaattcccacctatgagtgataatatgcggtgtttggttttttgttcttgtgatagtttactgagaatgatgatttccaatttcatccatgtccctacaaaggacatgaactcatcatttttgatggctgcatagtattccatggtgtatatgtgccacattttcttaatccagtctatcattgttggacatttgggttggttccaagtctttgctattgtgaataatgccgcaataaacatacgtgtgcatgtgtctttatagcagcaagatttatagtcttttgggtatatacccagtaatgggatggctgggtcaaatggtatttctagttctagatccctgaggaatcgccacactgacttccacaatggttgaactagtttacagtcccaccaacagtgtaaaagtgttcctatttctccacatcctctccagcacctgttgtttcctgactttttaatgattgccattctaactggtgtgagatggtatctcactgttgttttgatttgcatttctctgatggccagtgatggtgagcattttttcatgtgttttttggctgcataaatgtcttcttttgagaagtgtctgttcatgtccttcgcccactttttttgatggggttgtttttttcttgtaaatttgtttgagttcattgtagattctggatattagccctttgtcagatgagtaggttgcgaaaattttctcccattttgtaggttgcctgttcactctgatggtagtttcttttgctgtgcagaagctctttagtttaattagatctcatttgtcaattttggcttttgttgccattgcttttggtgttttagacatgaagtccttgcccatgcctatgtcctgaatggtatcgcctaggttttcttctagggtttttatggttttaggtctaacgtttaagtttttaatccatgttgaattgatttttgtataaggtgtaaggaagggatccagtttcagctttctactatggctagccagttttcccagcaccatttattaaatagggaatcctttccccattgcttgtttttctcaggtttgtcaaagatcagatagttgtagatatgcggcattatttctgagggctctgttctgttccattgatttatatctctgtttttgtaccagtaccatgctgttttggttactgtagccttgtagtatagtgtgatgcctccagctttgttcttttggctcaggattgacttggcgatgcgggctcttttttggttccatatgaactttaaagtagttttttccaattctgtgaagaaaggcattgatagcttgatgaggatggcattgaatctgtaaattaccttgggcagtatggccattttcacgatattgattcttcctacccatgagcatggtatgttcttccatttctttgtatcctcttttatttccttgagcagcagtttgtagttttccttgaagaggtccttcacgtcccttgtaagttggattcctaggtattttattctctttgaagcaattgtgaatgggagttcacttatgatttggctctctgtttgtctgttgttggtgtataggaatgcttgtgatttttgcacattgattttgtatcctgagactttgctgaagttgcttatcagcttaaggagattttgggctgagacaatggggttttctagatatacaatcatgtcatctgcaaagagggacaatttgacttcctcttttcctaattgaataccctttatttccttctcctgcctaattgccctggccagaacttccaacactatgttgaataggagtggtgagagagggcatccctgtcttgtgcccattttcaaagggaatgcttccagtttttgcccattcagtatgatattggctgtgggtttgttctagatagctcttattattttgaaatatgtcccatcaatacctaatttattgagagtttttagcatgaagggttgttgaattttgtcaaaggtcttttctgcatctattgagataatcatgtggtttttgtctttggttctgtttatatgctggattacatttattgatttgcgtatagtgaaccagccttgcatcccagggatgaagcccacttgatcatggtggataagctttttgatatgctgctggattcagtttgccagtattttattgaggatttttgcatcaatgttcatgaaggatatgggtctaaaattctcttttttggttgtgtctctgcctggctttggtatcagaatgatgctggcctcataaaatgagttagggaggattccctctttttctattgattggaatagtttcagaaggaatggtaccagctcctccttgtacctctggtagaattcggctgtgaatccatctggtcctggactctttttggttggtaagctattgattattgccacaatttcagatcatcttattggtctattcagagattcaacttcttcctggtttagtcttgggagagtgtatgtgtccaggaatttatccatttcttctagattttctagtttatttgtgtagaggtgtttgtagtattctctgatggtagtttgtatttctgtgggatcagtggtgatatcccctttatcattttttattgtgtctatttgattcttctctctttttttctttattagtcttgctagcggtctatcaattttgttgatcctttcaaaaaaccaacttctggattcattaattttatgaagggttttttgtgtctctatttccttcagttctgctctgattttagttatttcttgccttctgctagcttttgaatgtgtttgctcttgcttttctagttgttttaattgtgatgttagggtgtcaatttttgatctttcctgctttctcttgtgggcatttagtgctataaatttccctctacacactgctttgaatgtgtcccagagattctggtatgttgtgtctttgttctcgttggtttcaaagaacatctttatttctgcctttatttcgttatgtacccagtagtcattcaggagcaggttgttcagtttccatgtagttgagcggttttgagtgagattcttaatcctgagttctagtttgattgcactgtagtctgagagacagtttgttataatttctgttcttttacatttgctgaggagagctttacttccaagtatgtggtcaattttggaataggtgtggtgtggtgctgaaaaaaatgtatattctgttgatttggggtggagagttctgtagatgtctattaggtccgtttggagcagagctgagttcaattcctgggtatccttgttgactttctatctcattgatctgtctgatgttgacagtgggctgttaaagtctcccatttttaatgtgtgggagtctaagtctctttgtaggtcactcaggacttgctttatgaatctgggtgctcctgtattgggtgcatatatatttaggatagttagctcttcttgttgaactgatccctttaccattatgtaattgccttctttgtctcttttgatctttgttggtttaaagtctgttttatcagagactaggattgcaacccctgccttttttagttttccatttgcttggtagatcttcctccatccctttattttgagcctatgtgtgtctctccatgtgaaatgggtttcctgaatacagcacactgatgggtcttgactctttatccaatttgccagtctgtgtcttttaattggagcatttagtccatttacatttaaagttaatagtgttatgtgtgaatttgatcctgtcattatgatgttagctggttattttgcttgttagttgttgcagtttcttcctagtctcgatggtctttatattttggcatgattttgcagtggctggtaccggtttttcctttccatgtttagcgcttccttcaggagctcttttagggcaggcctggtggtgacaaaatctctcagcatttgcttgtctgtaaagtgttttatttctccttcacttatgaagcttagtttggctggatatgaaattctgggttgaaaattcttttctttaagaatgttgaatattggtccccactctcttctggcttgtagggtttctgccgagagatccgctgttagtctgatgggcttccctttgagggtaacctgacctttctctctggctgcccttaacattttttccttcatttcaactttggtgaatctgacaattatgtgtcttggagttgctcttctcgaggaatatctttgtggtgttctctgtatttcctgaatctgaacattggcctgccttgctagattggggaaatactcctggataatatcctgcagagtgttttccaacttggttccattctccccatcactttcaggtacaccaatcagatgtagatttggtcttttcacatagtcccatatttcttggaggctttgctcatttctttttattcttttttctctaaactttccttctcgcttcatttcattcatttcatcttccattgctgataccctttcttccagttgatcgcatcggctcctgaggcttctgcattcttcatgtagttctcgagccttggttttcagctccatcagctcctttaagcacttctctgtgttggttattggagttatacattcttctgaatttttttcaaagttttcaacttctttgcctttggtttgaatatcctcccgtagctcagagtaatttgatcgtctgaaggcttcttctctcagcttgtcaaagtcattctccgtccagctttgttctgttgctggtgaggagctgcgttcctttggaggaggagaggcactctgatttttagagtttccaattttttctgttctgttttttccccatctttgtggttttatctacttttggtctttgatgatggtgatgtacagatgggtttttggtgtggatgtcctttctgtttgttagttttccttctaacagacaggaccctcagctgcaggtctgttggagtaccctgcagtgtgaggtgtcagtgtgctcctgctggagggtgccccccagttaggctgctcgggcgtcaggggtcagggacccacttgaggaggcagtctgcccgttctcagatctccagctgcgtactgggagaacccctgctctcttcaaagctgtcagacagggacatttaagtctgcagaggttactgctgtctttttgtttgtctgtgccctgcccccagaggtggagcctacagaggcacacaggcctccttgagctgtggtgggcttcacccagttcgagcttcccggctgctttgtttacctaagcaagcctgggcaaaggtgggtgcccctcccccagcctcgctgctgccttgcagtttgatctcagactgctgtgctagcaatcagcgagactccgtggggtaggaccctccgagccaggcacgggatataatctcatggtgtgctgttttttaagcccgtcggaaaagcacagtatttgggtgggagtgacccgattttccaggtgccatccgtcacccctttgtttgattaggaaagggaactccctgaccccttgcacttcccgagtgaggcaatgcctcaccctgcttcagctcgcgcacggtgcgtgcacccactgacctgcgcccgctgtctgtcactccctagtgagatgaacccggtacctcagatggaaatgcagaaatcacccatcttctgcgtcactcaggctgggagctgtagactggagctgttcctatttggccatcttggctcctccagatggtgactcatttctaaaccctcctcataggaaggtgaggactctctcatctagactcagccaattagagagatgttgactctgggcttagaaccatagaaaagattctggattcccttcttgtacgaaggtcacagaggatcaccactcttgcatattgtataaagccctcaggtgacatggtgagtgtcataggagttcacagcacacaggtgagataatgtgtcttgaatgcatgcccaagtgacagtaaagattgtcattctcccacataaacatatcccactgttgaggttctgaatctcagacatggaggctgtgaaagttggagaattgactctcctatatggcctgggccacaggtgggctggtgaacttcagaccaagaattcagcacacatatgaggctgtgactgcactaacagaacacagtctgcagaagaaatggtagctcttttgcaaaaattctgtcagctattgagattgttactcatgaacttagacccatcatacaggaggtgttgactctcatatctagaacatggacctgtatggaatatctaatctcattcctggactttcctgcaggtgtgattgtgcctggtaagcattttagtgatttgactctcctgccttggctcagccctcagatgagactgtgacatatctctggactctgcacctcaaagaagtgactcgcttttccaggcttggtgttgcccacaggtgtcatggtgacatatggctgggccttccacccaggtaatgtgagtcttttcttgctttgtcactgcccacagggtgcattgtgatatattcctaaattctgcacttaggttacatgactccattttttttttttttttttgcctaagccctgagtattttgcatagtataacatattaccaggcccaacacctataaaatgggaggcttctgcctgggcctttcaacagagggccttgtgacatatctctgcatcaatcacctaggagctgtgactttctgttattgcctttactctgctcacaagaaaaattacgaattatcactaggcccagctaccaggtgatgtgtctctcttgcatgggtcttgactatagaaagcgttattagctattgctgggctcagcacccaggtgatgtgactctgctgcctgtgttttgctttcaggagaaggttgtaacatattcctggctgagtattaaagttatgtgacactcctgtctgatccctgccctcagtaaagattgtgatgtattcctggccaaaaacccaggtgatgtgactctccttctctctgcctattcacaggtgggattgtaaaatatagtttggcctagctcacaggtgcaatggtgactttcatacctctacccacctaacaggagagatgctgtcttttgtagctaggcctatggtaatgattataatcctgagtctcccttttgtacaaagtcataggaaattaccaatttcttgcatactatataaatctcttgtggtacagagagtgtcttcccagggttcagcacacagggagattgtagttcttatgtgcaatgtgcacagcccaccagctgttgggattgtcaccctcacacttggatagagcacactggtgaggccctgaatttcacacagacacagtccacagtagaaactgtgaactctcatatgtgaacatccagtcagggttgaaatgatgactgatttatgaacccagtacattggaaggtgagaattctatctgaacccatgaaaattctacctgggcttagggctagagtgaacacagtttacaggaggaatgaagggtctcaagctccaatccagttcattggtgaggttatcactaccttacttagacccaacatagaaaatgtggtgactctcatacctagaactgagacctgtgcaggattgttaattcactactggactttcctgcacgagtgattattacatatgcctatgttcagccctgagtgatttgattttgctgcatggtcccagtctgaaggtaagattgtgattcatcactggatccagcacctcggtgatttgactcttctttttttggggaccccacaaattttaagtattgtcaattttggctgaatcctgcacccatgttatatgactctcccaaatgtgccttacatgttgtgccgtattggggctcaatatatcacattagacattgttacatattgctgggttcaacacccaggtgatgtaacttttttttctgggactgcctgcaggggaccttgtgacataactcaatgtccatcaccatactgacgttactctcttctcctgcctggtctctgctcacagagaaattgtgacagattactggcctagcatctaggtgatgtgactctcctctttttctcaggctctacacatttgggtattgtgacatattgctgaactcaactcctaagggatgggagtctcctacttgggaccttcctacaggggacattgtggcatgtctctgcattcctcacctagcagatgtgactctcctcttctgcctgcaccctgcctacatggaaagttgtggcacattgctgttgtcagcaaccagatgatgtaattctcctgcctgggtctttattacaggaaagatgattgacatattactgagcccagcatccaggtgatgtgactctcttcttcttctggtccctgcttacagagaaattgcagcatattgctacactcagctcctagcttatgtgactcttttattcatttaggttttgccttcaggtgacattgtgtcataatgctggtccctgccctgacaatttgtgactcttctgcctgtgatttgcccatttgggccattgtgacatgttgctggattcaacactcaggtgatgtaacttttatgtctgggccttgcctacagggtcattttgaaatgtctctgtggctgggcgttgtggctcaaacttgtaatcccagcactttgggaggatgaggcaggtggatcaaaaggtcaggattcaagaccagcctggttaatatggtgaaacactgtctttactaaaaaaattaataataattacaaaaagcagctgggtgtggtgatgggcatctgtagtcccagctactcggggggccgaggcaggagaatcacttgaattcaggaggcagagtttgtaaagatcacacaactgcaccccagcctgggtaacagagtgaggctccatctcaaaaaaaaaaaaaaaaaaaaaagaaagaacgaaatgtctttgcaccaatcccacagatgatgtgactctcttgtgttaccatgtctctgctcacaggaagaactgagacattttacagcatgtagctgatttttgttgttgttgttgttcctgcaggaaagattgggcactgttactcaactaggcaccagaaagatattattttatttttcttagtcctgcccatgtaagacattgtgtcatgttcctgggccctacacgaagatgatgtgagttttctgtccatcaactattttatgtgactctcctctcttaccttcaccttgtccataggttagattgtaatatatctttgggcctgggtcacgctaagagaagtgagagtgacttattgctgggcccagcacacaggggatgtgattcttccacttggttcctgcccaattggtcattgtgacatatctctgagccaatcacctaaatgataggtctcttcttatctttctggacctgtccacagtaggaaatgtgacatatcactgggccaagcacctatgtgatatgactctcctctcaaaccaagcccttgcctgatgtaattgtgccatatagctgggcccagctgctacattagctgacctcatttttttcctgagccctacaaaacaatagcattataagatatttctgggccttttatctaggtgatttgacttttctgtctggtatgtcctctgaggggttattgtgacatgttgctgggtgcagcatttaggtgatgtgacttcctctactgcttggtctgaccaaaaggggattgtgatgtatcactgggcccagaacttatgtgatgggactcttttctcttgtctaggccctacaaacattttgcattgtgacatatagctgggtctgccacccaggtgatgtgagacttctacataagccctgaccacaagagtattatgaaacatcttttcattcatcacctaggtagtgatgtgactcttcttcagcctctacactgccacaagggaattgtgatgtatcactggacccagcacctagatgatgtaagacatcttttgactggaccttgcatattttgcatattgttacttttactgggtctgacattatgggatgagaggctcctgcctgggccctgccaacaggtggccttgtgacatattttggcatccatcacctatgaaatagggctctcctcacctacatgcaccatgcacaaagagaagatggtaacatatcactgggatcagccaccaggtgtgtgtataaccactcagggtgtttctcaaagacagcattgtagtgtatcactgggcccagcacctaggtaatgtgacttgtggcctgtgcacatcttttctttctctctttcctttttttttttttttgagacagagtctcactcttgtcacccaggttggagtgcagtgatatgatcttggctcactgcaacctctgcctcctgggttcaagctgttctcctgccttagcctcccatgtagctgggattacaggtatgcattgccacactgggctaatttttgtatttttagtagaggtggggtgtcaccacattggccaggctggcctcaaactcctgatgtcatgtgaaccacttgtcttgatctcccaatgcaagagccttccctcttgtctgggtataagccaatgcacccagtctgcctgtggccatcttacaggaataaattctaatgcatccctggccaagcacctaggtgatgtgatatgactctactctctggttcttgccctcagaaaagattgtgacatgcctttagaccagccccagatgacgtgactcttctgctcacttcctactcagcagcataattgtgacatatatcttgccccagcttgcaattgctatgttgattctcacaccttgaaccaggcaataaaagagttgcactctctcctagttaggcttaggaaaacaaacacgatccttagtcttttcgttttgccaaggtcatagagaattaccacgccctcaaatactgtataaagcccttgggtggcacagagagtgtcatcaagggacaaaaacacagatgatattgtgtttcttttattttcttttttttctttggagatgggagtctcactctgttattcaggctggagtgcagtggcacgatcttggctcactgcaacctccacctcctgagttcaaatgattctcctgcctatcctcctgagtatctgggactacaggcgcatgccacgaagccgagctaatttttgtaggggttttaccatgttggccaggctggtcttgaactcctcaccttaggtgatctgcccgcctctgcctcccaaagtgatgggattacaggtgtgagacactgcacccagccaaagtttgtgtttcttaaaagaacttcctgccgcctgttataattgtaacctcaacatggacagagcccactggtgaggtcctaaatctcatatgcagatgcagactgcagttggaattgtgactgtgatatacaaacatccagccaggaatggctcatttctaaagctacaaatgatgactctcttctaaatgtagctcataggcaggtgaggactttcctaaatggatcagccagttggaaagatattgactctcattcctgggcttagagtcacatgtagtatcatgggtccatatcatcacaaatgtcttagagtagattgcgactcacatgcgtattgcataaagtgtgggggatcagtcagagtggtgaaaagggaactataaatgttaattacctacaggttgtgttggctccaggtatttgacattgtgcctgcactgaataaaagcaagcagctccagcttctcggtgctgaaatctggccacaagagctgggcagttccctagctgctttaagactgcatacctatgtctgagtacttatttcatctgtcagccaggatgtgtgggacagaaccagcaggtggtgccccatgtgggaagcaacaaaatggatcatgacggaaccctcaaaaatgaaagggaagtgactgcacagtaagtaatttgtgtccactggggatttccaagttcaaaggaattttttcaagccagggttttatttattattattattattattattttgagatggagttttgcttttgtttcccaggctggagtgcaatggctcaatcttggctcatggcaacctccacctcccaggtttaagtgattctcctgcctcagcctcctgagtagctgggattgcagacatgcaccaccatgcctggctaattttgtattttttttgtagagatggggtttctccatgttggtctggctgatcttgaactcctgacctcaggtgattcactcacctcattctcccaaagtgctgggatcacagacatgaaccattgtgcccagactcaagctagggctttatcatgtgacaacaattatcagctcaacagcaacagtatataaaaaattgaaacaactgctaaaagctagtggagcctcagtttcaaaggctcaattaagggacctaatgcaaactgttgttttccatagcccatggttcccagaagaaggcatactagacctagaactctgggaacaagtgagaaggaatcttaaacattatgcacatgggcaacgagtcccagtaacatctttaatgttctttaatattatgggccttagttagggctgctttggccctgctctatacagaacagcctaaaaagggaagggaggaagaatcatcatctaccttactgcctcctcatcttcctcctcctcctcctccctcagcctggttgttaccagtaaaggtgccacagaggaggcagagatttttcctgagccccctctcccaataaattggggaaaagacaagggatacattacagttatgggaccctgtgttaggtaagcagcattagaaggggagctcttggcctgcccaatgatggaagatcaacaaggcagtcaggtacatgaacccattactttgaagacttataaagaaaaagcattagagaaaatggagccactagcccatttaggagaggattacttgaggccatagcagaaaactaccatatgaccccatgggactggtcaatattagctaaaacaactttagaggccagtcaatacctcctctggagggcagaatatgatgagttatgtgaacaacaagttaaccagaatcagttgggccaggcaaaacataacagctactatgctccaggggaggggtccctatgttaatgtataacaacaattaaatttttcctccaagcctatgcacatgtgtctttgtgcactcacagggcctgggaacgaattcccaaaggcagagtccaacagagatcttttgtaaatgtatgacaagggccccaggagccatttgttgaatttatcaattatttaacccagataacagtggaatgtacccattccacccttaagagtatgcttaaaaaaccaaaaacgggaatatgagtaggaaccctacaacactattagcacgagccttatttaccctaaatttcttaaatttagataataaatttcagtcagccatagaaaagcactttgcaaaaacctctcaaaatataaagcctcaagttttatggaaagatgtaaatagttgttgggaacaagcccccaaatctggccataaactggccccaaaactggccataaacaaaatctttgaagcactgtgacatgctcgtgatggccatgatgcccatgctgaaagttgtgggtttactggaacgagggcaaggaacacttggcccacctagggtgggaaaaccatttaaaggcattcctgaaccacaaacaatagcatgagcaatctgtgccttaaggactgattcctgctgcagataactagccagagcacatctctttatttctcacaaggaatatttttagttaatctataatctatagaaacaatgcttatcactggcttgctgccaataaatatgtgggtaaatctctgtttggggctgtcagttctgaagtctgtgagacccctgatttcccagtccacatgctatatttctgtgcgtgtgtctttaattcctctagtgccactgggttagggtctccatgactgagctggtctcggcaaatagtaatgtatagtgtggtccaaattatttgttaatgttgggaagaggatatgcttgggttcacaacccctcagcctctttggattccagcgtgacacaccaaaccttaccacagcatggctaggacccaaccccgtaccaaaaatgaaggaaattatcctgcagaacctgcaaccccagacaatgccactttctcagacatcacaggccccagacattacctgggggatgctgaagaagacaactcaggaggctgagtgaattctgctgcagaaaaagaaaccattccctcagataatgtgttcctttctatgctttctgttgtacattgtaactcttgcagggtattgattcttcttattctctcactttgcctgcaacccatacctgctatactctattgggcccatcttctagatccacctttcttccgcactgctacttcggcagagaccctcttcctagcctctaaaaatgcgactgattggctggaagggattgacatacctctagtgggggtccctcagtaatggcatacattggactgaggtggcaagtaccattacatatcactccttgattgtaaaagaataatattgattatactcatgtttgttttatattatttactggttctaagatgcaaagctggaacacaagctgtaaccactatgccagtcactgctcacatctgtatgcttcaatcatcaaaacttgatgcaaaaaaaaaagaggggaaatgttgggcttgggggggtgtcggtcagagtggtgaaaaatctatagggaaagaatgcaaacctcctgaaagtttggaaggtcctgcagagccccaggggataatagctgaaggcacctgttctataaccttgagtcagggggtgaggagtaaatacaagggagtgtgggggaactttatcttaaagaggcttgtttacttatgttgaccagaaactgacctttgatcatttgcacatgtgatgtttcttgaaaggggaacaataaatgttaattacctgcaggttgtattggctccaggttttcggcattgtgcctgcactgaataaaagaaagcagcccagcttctcagggctgcactctgtccaatatagccaggcagtcgcctagctgctcttacactgcatacctgtgtctgagtactcatttcatccatcagccagggtctgtgggacagacccagcgataaagccctcaggtaatatattgaatgcccttatatggtccagcacacaggtgacattgtgatactggtattcacaaccagtcaacagtaaatacgtcatccttttagataaacacaatctacttctgaagttctgaatctcatccctggaggaagtggaaagctgcaaaattgactctcacatgtggatctggtccacagctaggctgctgactcagatcaagattcagcacacctgtgagactatggcgtttactgaggagacacagtctgaaggagagaatgagactcttattcataaacctgtccacattgagattgtgatttgcatacttagacccaacctccaaatggtcttgactctcatacctagaatgggaatatgtgaaaagttattcatgctatccctgagtctttctgcatgtgtgattgttacacacatctctgttcataacctgagtgatttgacactcctgcctgggccctgcacacagatgggattgggacatattgttggaaccagtatgtagatgatgtgaccctaaactcatgccttggtgctgccaaagagggcattgtgacatatcactggtccctgcacccaggtaatgtgcttgtcctttctgtgccctgcccacattggctactgtaacatatccctgggtctaacacccaggagatatgaatctctgccctagaccctggctacaggaggcattttgccatattcctggacccatctatttgatgggttactttccactcttacatgggcttttccctaggagacatatgtaatgtttctcttttctcctatctggacccagaccacagaagcgagagtgactaatccctagtgacatttcacaggtgatgtaatttttctgccttatacctgtccacagaggacatagtgaatgtccctggcccactaaactggattatatgactttttatttttgtctcagaactgtcaacagtggggattgtgacagatcactcttctcagcacttacataatatttttcccatccttgggcactgcccactggggtgattgtgacatataactaggtgaaggccctaggttatgacttttctcttcgacattagccttgcccacacagggtgttttgacatatctctgaagctctaatttaggtagactgctgcatgggctcttcatttttcagggagtattgtcccatatttttttcacctagtaataaggtgatgttactctcttctagtgcttgggctctgcccaaaaagggcatatttcaaaagttccatcacctaggtgttgggtccagccacatttcaatatacaaattgtatattgtgtatgttaaaaactgtgtatattgaaatacggctgggtccaacacctatgtgatctaactctcccacgtgagcccttccaataggggaattatgacatattttgtttatcacctaagtgatgtaactctccttttctacctgagccctgtataaagggagaattgtgacatatcactggacccagcatctggtgatatcaccctcttttttcttttcttttgtcttttttttttgagatgacatctcactttgtatcccaagctggagtgcagtggtgtgatcacggctcattgcaacatccatctcccaggttcaagtgattctcctgccttaacctcctgagtagctgggattacaggtgtgtgctaccacagctggctaatttttgtatttttagtagagatggggttttgccatgtttgccaggctggtctccaactcctgacctcaagcgatctgccagcctcagcctcccaaagtgctgggattataggcatgagccactgcaccagcccttatcactctcctctttcaaattggccccatctattttaggtattaaaacatattgctgggtcaaatcaagtgggtgagaggctctagcctgggccctgcccactagaggccttgtgacatgtctctgcatcctttactttgaggtatgactttcctcttgcatctgcatcatgcccacacagaagattgtgatatacttctgggttcagcaaccaggtggtgtttttcttgtacccaggtcttacctgcagaaaaaattgtgacatatagctgggcccattacccaggtaatatgtctttgctgtttgtgccctgctttctggagaaaattgtaacataaccctggccaggcaaccaggtgatattactctctgcctggtctctgccctggaaaaattgtgacatatttctgacccagcacccaggtgatgttagtcttttgtttttttctactcacagtttgggttgtgacatataccttacccaagctcacagttgtgatgatgacacaaataccatgaatcagccaaaaggagagatactggcacttgtaactaaacttagagaaatgggaatattcctgtgtcttctctatataataacatcatagaggattaccattctttcacatttatattaagtctttggatggtacagagagtgtcatcacagaaccaagcacacaggtgagactgtgtttcccacatgcacaacctaccaaatgttagcaatgtcaccctgacacatggacagtgcccactggagagatactgatttcacaggtgagtgcagtccacagtaaaaattctgactgtcatatgtgatcatgcccccagagttaatatagtgactcatttctttctttcttttttttttttttttgagacagagtcttgcactgttgccaggctggagtgcaatggcacaatctcagcccactgcaacctacacttcctggttcaaatgattatccagagtagctgggattataggtgcatgccactagtcctggctaatttttttttttttttttttttttttgtatttttagtagagatgggatttcaccatgttggtcagactggtctcaaaatgttgacctcaggtgatccacccactttggcctcccaaagtgctgggactaggggcaattgtttaaagatattttgtttctgactagcagtctcacccattatttctttattctgaaatttctaaaacaaaagaatatatgtagccaatcaataacttatgcatttaagtatgaattcttggtaaataacttagggactggcttctcacttttttgaaaagactcactttcaatggctgttaattgaaatatatattcagggcaacttaaatctgtcctcctgatggccatcctcaatatcagatcttgagtaaatatatttcagattacattttaactttttgattattttaagttgactcagggctggcctggaacattctcctgggtgtaaatactctgactataagctacctgctcagtagaggaaactaatcaacagcatggcctagcatagttcaaagacacatgtggtgagaagctcactggggcctggctcctaattgcaaggacagttgcacaggtgtgtctgaatgcttggtgagcctggcctttcctcacccaatgtctctcaccagccatttcaaccacatcttggccttctgtcattctgttctctggggtgaaaactcatcttcagggctgtctacaacaaaagagaaacatcagattaccaaaacctcaggaatagggattacagattggattaagagcctgcgctttcttaaggatgatatgtatggaaaatcagcaaataatttcagaatgatacaagaaaaaatgcctctaataggtattcatactatagttcaactcgatttgttctgtacatggtagggaaaatgggataaaatatcgtaagttcaagcatttttgctgctcagtcagaatgaaaccctgcagcaggcatgggcatgtttcatgagagaaatagaataaaaagagttagacaatatgatcatttattgcaagccccctgccacttgattcagtgagcatttttgggtgaagtggaacctctttctgtcaggtctgaaggttcagatgtgtcggtcctatctgcccctagttcacctgaaagttctattgagaaccctttgtccctcctccttacccttctagttcctctctacacccaccacgccctgaagaatggaactcagtgggtactactagtagtggggctgcctatcaacctccaaaaggaaatctttgtccacttagagaggttgcaaatggggaagaagtcattgtgagaggacatgtccccttttctatgtctggtttggctctataataagacaagtttggtcatttctctgaagatccagaaaaattcatagatgagtttgaaaagttaactctgacctatactttaacttggcaggatctgtatgttttgttgtctctgtgttgtacgtggaagagaaacaatgcattttggggacagctaggactcatgcagatgaggtattggcttgcagcctgaaccataatatatatcagacaggaggtatagcagttccagattaagatctacgatggaatatcaaaggggcagtgaggacttgggagaagagatcatatggttacttgtttgttggaagagatgaagaaatgtaagaaaaaccttgttaacaatgaaaaggttaaggaagtttctcagggcaaagacgagaatccagctttgtttcaatagcatttagttgaggcaatcaggaaatatactaacatggatcttgcctcaaggtaaagataaacccttctgggagtccactttataacccagtcttcctctgatatccatagaaaactagtaaaagcagctatgggtccccaaacttctatgaacagctttggatatggcatttttagtttttaataacagaggcaaagtggaggaaggagaaagaggaagaaggacctccacaaggtgcagcttttggctgcaaccttaagcttacctcccatatgggaggttgccttcctaggtcttggcttgaacaagggaagctgaaaggtgaaaagcccaaagctgggaatccgagtcactgtgctttgggcataaatcagtgtgcacactgtaagaaaacaggccattggaagagggatagtccagtgttctgaagagagccgtcagcacccaaactaatgatgggtgaaacagccaggcaagtgcccaagagtgacggggcctgagaccttccatcacagcttccatcagacaactagccatatatctggagaagcctcagtaacctttgccatggcaggtaagaatattaatttttgccaggtgtggtagctcacgcctgcaatcctagcactttgggaggccaagatgggaggatcacttgaggtcaggagtttgagagtagcctggccaacatggtgaaaccccatctctactaaaaatacgaaaaaaaaaaaatctgggaattgcttgaatccaagaggcggaggttgtggtgagctgagattgtgccactgcactccagcctgggcaagagagcgagactctatctcaaaaaaaaaaaaaaaaaaaagaaaacaaaaaagaatattaactttcttctggatggcttactctgttttgacccatataatgggtctctgttgccccaaaacttcatggtcacaggggtagactgagaagcctatagatgccattttacctattctccatgctgtttttcagagaccttggttttcttacacaactttcttatcatgcctggatacctcagggcagttgcagcaacttctcttttggtagatgaatccaataaactggctttagaacaacacctggaagttaaaacccacaccaagtacaaggagtcctagaagctaaaggacaccagtggatgacagggggacgcttattgaaatagcaggcattttgctagacactcctgataaactactgatatgaggtgctaatcaataaaaaatagttaaacatttgcatgactctacccatttgggaagagattccctgtttcaaataatgtcttggctttttatagaaaaaggattacttaaaacagtaaactaggttacttgagcctgtgaaggatgtgtctggaataacccaaatgaccaatgtttacctcctcctttagtaaggcctattcagcatagacgaacataccctggtgaagactggcaaatagactatactcagatgaccccatgtaaagggtttaaatatttattagtattcattgacacctttggatcgaggcttttcctacccgatctgaaaaggcaattgagattcccaaactcctgctaaaagaaataattacacccctgggtgaggtggctcatgcctgtaatccctgcactttgggaggctgaggcgggtggatcatctgaggtcaggagttcaagaccagcctggctaacatgatgaaacccccgtctctactaaaaatacaaaaaattagccaggcgtggtggagggcacatctaatcccagctacttggatgctgaagcaggagaatcacttgaagctgagaggcagaggttgcagtgagcttagagtgtatcactgcactccagcctgggtgacaagagtgaaactcttttgcaaaaaaaaaaaaaaaaaaaaaagaaaagaaaagagaagaaataattcctagatttgggctgctaagaaattacacagagataatggcttatttttcacagtgacaaatacacaaaacatatcttgatacctagaaatttagtactgccttcactcagcgtgaaggccacagtcttcagtgaacgtaaaaagagctaatcaaactgaaaagaggactcttgctatgctatgccaagaaatatcaaagacctggctgtctttactatctgtagccttattacagattccagtggcctctaagggaaatctgcagctcagctcttttgaaataatgtatgcaaggccttttttagctacacgccttctttactgtgcctaatagacacggatactttcaagttacagaattatgtgacaagtgcaaaacacactctgaatatggaaatcaaagactcctttccccaactaaggaagctaatcttgttataacccagccaggaaatttggtcctattaaaaacttggaaaaaaggatccccagcaggtcaactttccccaaagtggaagggaccctatcaagttctctttagtaccccaactgcagttaaaattctgggaataaatagctgggtccacttaactcgaattaaacctgtctcttatgaagtcctacaggacggcagaacagaagaaactgatcctgtttattcccatgagccagtgacctttgactcctgttcagaagaaatgaaagggatgggtaacataaagatatagattggctttctacttttgggaattagttgaaatcatgcagagagtaacttatttactgagtgggcacagacttcatcctgtctacataatcgaacaaactgttgtgtatgtagacatttaaacagagactcaaaaggaaacctatgctttgatcaaaaccaaatgttttgtgtgtgctccagactatttacataacataacccagggcataaaagttttatgcactcacatctctgccatttatgtgctatcagtgaaccatatatcagtttggttctaacaactgcccacttcttgaaaggctttcctgtttagtttacgtggaataattttactaattttgctttgctgttgtggaatatattgtggttgtactctttgtgtaggaatgcaagacaagctcactaaatgctttcttaaattggacgcttattaatcttctagacatcaccttcttttggaactagaagttatgaacgaccttcaccataccaacactgtctgactgaatttctctctaccctgaatgcaagagaccaatggttaggcaggaatattatcgcccctaatcagcctgaaaaagttacagaagacgaatctttgtctctctgcaactcttaggattaagggtcctcttgtaaaggaaggcgaaaaatatgtcagaatcatttgaaccagagcgactccgttttgagagagagctaggaaaatgacgctgagactcgctgggctgcattctcagtaagttaggcattcctagcctctagatatttatggttaaggaaatgaattaataatgtttactaagcagaaccagacggaggagtgtccagatattccaacatctggggaataaaggtattcctaattttgctttaaagataatatcgagtcggccaggcatggtggctcacgactgtaatcctagcattttgggaggtcgaggcgggtggatctcctgaggtcagaagttcgaaaccagcctggctaacgtggcgaaaccccatctctactaaaaaaaaccaaaaaacaaaaattagcccggtgtggctgtgtgcacctgtagtcccagctactatggaggctgaggcaggagaatcgcttgatcccggaaggcgaaggttgcagtgagccgagatcgcgccattgcactccagcctggacaacaagagcgaaactttgtctaaaaaaaaaattattcacatatttaatacgttgaaaaaaagacagcaaagaagagagaaaatttttccgtgttctgagatgggcctcgttcagctccgggaggaagccccgcctgaaaaggctgaggcttaggctgtcaatctttcttcattcagcccaacgtctgatgacatcttctgtcactcagggccttagaaagcggggttcttaaacgttatccaatcagagacgctgtcctgggaactgtccaatcaggcacgcagctggagcgaacagggcggcttccgggatttggcggggcctttgtctctatctgcggccggagctccaggtctcgtcctcactactctgtgtcttctgcttttaggggcgcagcctctgtggccctgtgacctgccccctggaagcctagaaatggtgagagtgccgggtgcgacatcccaagagagggaacggggctggctggaaccggtgggaagcggcagtggcgggactcaggcctcctcgctgtcagttttacaatctgcgcccgagttgttgcccagctcggcctcagtcccttcagccttaagatggcggctgcgctgacagccgggctcccgggcgttctgtctcttcactgcgcagtgactgtgccctggcctggagccctctttgggcagctctgcaccagtagccccgcgtctctcccagattgtgcagggaccatgggaggaacgtcagggcagaatcctgactccgggtgcgggctcatgaatgggaagagctttggtccgtggggttttcaggccattttttcctattaaaaatttatgggcctcactgcaaaaacattaaataatttaaagtgtgattcaaaaattttagagcaccttgctgtggtttctaatttgtattccatggaaggaaaggtttttataagtttcatcataaaaccaaattccgtaattggctaggtacggttatgtagattttgttgttattttgttgttgttgttttgttttcattttcttttttttttgaggcagagtctctgttgcccaggctgaagtgcagtttcgtgatctcggctcactgcaacctccacctcccgggttcaagcgatttttctgcctcagcctccctagtagttgggactacaggcgcctgccaccacatttggcaattttttttatttttagcggagacgggggtttcaccgtgttggtcaggcaggtctcgatctcctgacctcaggtgatccacccacctcggccttccaaagttctgggattacaggcgtgagccactgcccccgtcctagttcttaatttttacaatcaaggtggaaatatcatggttatgtaatcagagcttaattggcagtttatagttggttaagcgttaagcctgaattttgtttctgccaatgtagtaatttacaaaaaaatgctcttgagtttagactttttttttagaagtagaaatccagggactagagccacctcaatctaatttcctgccacttaatggttttcacactccacaggggactgattttttccctgaatttttcacaagtgtcccaagcagggcctcaagtctgcccctcatcccttattcctccagcctgactggcttgcagtaaaatactaaatttccagttttgtctgacgttgccaaatgccagtttctcctctctaattgactttatcaactatttgtcctttagtgtacatattgatacctattttaatgaatctttttttttttttaaaagtatttgagacagagccttgctctgttgcagtgcagtggctggagtgcagtggcatgacttaggctcactgcagcctccgcctcctgggctcaaacggttctcatttctgtctcccaagtagctggaattacagatgcctggcaccacgcctggctaatttttgtagttttagtagagacggggtttcactatgttggccaggctggtcttgaacttctggtttcaagtcatcctcctgcctcggcctcccaaagagctgggattacacatgtgagctaccgtgcctggtgaattaattattttttgacaaagcatttgatggcacatttacaatgattttttttctaaatatttcctacgagaataaagcaaagaataatctgacactattgtaaaatatctgtgtttttttcttttattttacctagtcacagatatcttagaatgtttttgggtcaagatttttttttttttggaaacttcatagggtgacgtatcttcagtcacacttcagttttagacaatcaactaattgaatggcctgacttgacacatgagtaaaacatatctgtaccttgaaaggatttgttcatttgctttgacctaaagtttatttatgtatctttttaagacagagtttccctctgtcacccaggctggagtaaagtggtgccatctctgctcactgcaacctccaaatcctgacttcaggtgattgtcatgcttcagtctcccaagtaggtgggattacaggtgtgcaccaccacacccacctagtttttgtattcttagtagaaatggagtttcaccatgctagccaggctggtgtcaaacttctggcctcaagtgactcaccttctttggcctcccaaagtgctgtgattacaggcatgagccactgtgctcagctgacctcagttttttaactgtgtattgcattttattagtagagcttgaaaggtaaggaaatatttacaaaggccataaaaggtgagtttcaaaaattaataatatattttacttgttgaaaacttttactttatctttctcagagtgagtttagaaattttctcaggcatgtgcttttatggctgagtgatttcatacagaagtccatctagcttttagaatggtagctaccaaagaaaaaaagaaaaaaaaaaaaaatctctgttcaatttcagctgtagacaatgaatacatttccccaaaaaatgtggtagataattggtgagttacatatattactgaaaacttcagttccttttttttagcagggtaaaattttgacagtgaatatctttattctgtatccttttttgtttgtttactacctgatttttaatacaaataataaaataatacatttactgtctgaaaggaatacatagttttgcttttcttactgaggtataaaatgtaagcaccttaaaatgttctttcgttatatgaacaccgaggaattttgctgattttttctaacagttttagtttcaaaaatgaaattaataactaacatggaaattaaagcttaagctgcaggagggtgccccttgtaggttgccatgagagtaagcaggaacaaaggaaagtagaggggttttattacctctaagcagcttgtccttcttactgtgtcctgtctccattggctggagttggatggcacaatccagttggctaaacccggttggctaacttgaaaagtgcaggaatgcggttatacctgtggcaaggcaggaagatcagtttcggtggaagtagcccttgtgacgggaggggtaattcacagagtgggtagcaggtgtgggatgtggctccatacataagaactggcgagaaggttgtttaccagggaagggggaacacagagagtaaggaagtctggccttgaaagcaagggaaaaaagggcaaagaaacttaagcaagctaaacttttgaagaataatttcttacagtattcaacatctatgcattacacgattaagaaaaggctcatttaaacaggatggcatttattacccagaaagttctgaaaaaactgtcgggagatacctgcttattagggtgctaaaaaaaggccacttaaaatcactattaaaaattgtagaacatggaagatatctgtatcttggactttccataaaaatgatgttttcttagggctaaattcagactgtaatttgctttagtgggggtaatacctcagtagtgatgctgtgtcctgcgtgcatcagcacactataaagacttgtcctagtgcagttgatgttaattccataagctctcttacagaatttttctttatggagttatttttctcttcatcattaagtatcttcatgcagctgatgtgcataaaccatcacacttaaatggcagctgcctgttttttttaggtattctttgcatttatcttttgttggtaaatgaaagctctcatctttgtttacaggccagaaaaactgaaaaaaaaaacacgactcttccacttactggatgtttgacaaaatagtcttttggggccaaaacatttgcattactaatgagcttgatagagattcagtaactcagactttatttcagatcttctgaaaaaatactctgcattaacgagatgtccagtttattgtacacatttaaatttgagtggtaccttctaactcaacatgtttattttgtctgaaaaatataaacagctgtctttttcatctgaaaaatatacacaactcattcagtattatgtaaatactgtactcaaaaatgtacatgttagtacatttttacactttatcattcagaaaagtatcatatatacactgatgttctggatattatgccagtctcttttctcagagttagagaatacattagaaaatgtttgtgttttgacaattattttattggataatttcagtccctcttataagttagaatcaattctattcactttctgattttaccttgagtcaaatgaaaaattctgcccatagccactttgtaaatatgtgtgtttgtgtgtattttccagggactgttgacatttagggatgtggccatagaattctctctggaggagtggcagtgcctggacactgcacagaagaatttatataggaatgtgatgttagagaactacagaaacctggccttcctgggtgaggataactttaatacaaaatttttaatataaactaaagcttttatttttcttttgtagtatgttttctggtaatttatgctttcctatttctgttttcaagaaaatcctggggatttgtctgtttagaaaaaatttcttcaagatgtttcatcctgacctgaaatttccacattcctgagctgatctgtgtctttcgctttagattagtggtaatttcagaaccttagtggcataaaatattgttattcacaccttaaaatccaagtgccattaccaatttttgcttcagtagtaccaggcagtgaaattaagaacctacaaaattaaaatattctgtaaatatttaaaaatttctgttataaattagtatatgggataaatttattagaatattctattatatcccttttactttgcacattactaagttggtaattggagaatatgagcaagattcatgttaattatttttaataaaacaggtattgctgtctctaagccagacctcatcatctgtctggagaaagaaaaagagccctggaatatgaagcgagatgagatggtggatgaacccccaggtaggtgagagtgaatacaacagatgacctggatgagaggtccaacgtcaagaagaaagccagtctttaaagtgatttggaaagctgcattccaaaggaaaccgtttctggaaagcctgaaatttaaaaaaaaatatactctcagataggggcatcttctgcttatgcttataaaatctctaagaattctactctcccttcaatgatcttccttaacgtttacagtgacagccaaagtactgttcatggcatataaaagagtgtacaatctgactttttttttcttgtttttgtggacagatagatatctgcatagttttgagacactctatgttaaaatttttttttgttttagaaggagtttcgcttttgtggcccatgctggagtgcaatggtgcgatctcggctcactgcaacctctgcctcccaggttgaagtgattgtcctgcctcaggctcctgagtagctggggttacaggtgcacaccaccacaactggctaattttttgtatttctcgtagagacggagtttcatcatgttggccaggctggtctcctgacctcaggtgatccacccacctcagactcccaaagtgctgggattacaggtgtgagccaccgtgcctggcctctctttttgcacaagagtagtggtttctgtttcattaggggtttttttttgtttgtttgtttttctgctcatttcatcctgttttttttcttgctttcttttttttttttgtttatttaatatggccgtttttacttcctgcagaaagggtatactcgccagcagttttgccatgagagtacactgagcaaaggagacagggtcatttataacctgatgtgtccactctactgctgtgtccagtttccactggctggaacgggcatcctgttttcattactatagccttgaaatatagtttgggccatgcgtggtggctcacgcctgtaatcccagcattttgggaggccaaggtgggtgaatcacgaggtcacgaatttgagaccagcctggccaacatggtgaaaccccatctatactaaaaataaaaaaattagctgggctcagtggtgggcacctgtaatcccagctactcaggtggctgaggcaggagaattgcttgaacccaggagccagaggttgcaatgagctgagatcatgccactgtactttagcctgggcggcagagcaagactctctctcgatgtatatatatatagtttgaaattataaagtataatgtccttctgctttgttctttttcctcaagattgctttggctattcaaaatttattgtggtttcgtgtacattttaggattgtaattttcattactgtgaaaaactggaattttgacagggagtttattgagtctagagatcaccttagataatatggcagtttcacaatacttattctttcaatagaaataaaatatttttaaatttatttgtgtcctctctaatttttttattgctatatctttcacttaaaagatttatgagctgcttggttaaatttgttctaaaattgattattttattgctattgtaaataatgttttttcctctattttatcagagagatggttttaagtgtatggaatgataacttataattgtatgttaatttcatattttgctaatcaactgagtgtattaattagtttaaagaggttttaatgtacttttttatatgtaagatgacataatctacaaacagtgacgttttacttattggtcttcaatttcaatgactttaaatttttgttttgactacttcttaattcacatactttcagtgctatgttaaaatagaagcattgacaataagagacaatagtattgcgttggtgtctgtaaatttgaaggagcaaacacctcttcagaattttataaactggtttcagaaactaaaaatctattttcgttgtacccccagggtgatagaatatcctctgggtttgtagtgaagaggggttgtagcttggtcttaagtctgctgggtttgcacaagggtccacttttagttgtcttgttaaacagggcttggatatttgtaattctcatttaaattttagacagagtgagtatccttcaggactttgctctgaagggcagacccaagggcaggtttctgcagtcaggtctgtatatggtgttctttatatcaggatgtggatgagcatggctttcacccagtacaagagaggattttcccaggtcactttggatttctacataggcagaactggccatgaactgtggctcagggagctggaactgagtcatggaactgcttcagggaccacaggaaaggccaaggtctgaggcctgccatcatggctataaatggaggtcttcctccaggcctctggaagggcaggacccacgctgcccattggctcccaagactgtggctgtgaagagtttgggatggttacagagtaagtttaaaattctcagtggaaccaagttaggtggagcactttcttgtctgtagccaaaaacagtggtcatgtagtttgcaacctgaacggaggcctgccttctaaacagaattaccttgaatcttgggctttagcagaatttcacaactcctttcctggatctcagagctctcttaaaggcatttatttttgagatgaggtcttgctacataatccaggcaagtcttaatattttgacctcaagcagttcttcaactgtaatgtaccatgtagttttcattacaggtgtgaaccatgatgcctggttctctcataaaagcatttttgtcaggaatggatgacaaattttcttgctgtcaggggataagcaaataggtcacctttttttttttttatcttattaatgccactctccatataaatttttactttctattttctacttcaaatttgtctgtaattttagattcagacatttaggacaatatactagaatttacatgttgttcctgaattaaattagataatacgcaggcaggcaaaaaggaattacagaattttcaaccacttttgtcagcctataactaaataacataatttattccccaaatatttgtttcacatatgaggctctaaccatattctgctaaatatatatataattaagcaatgtaaggctattctttgcttctaaacttggattacagtagttttattttgtgtaaaaatagcatatatttaaaacataaaaattggcatgaatttcttttaaatgcttatctattaaaagtttctcattagcatctcctatttatgattgtactgcattttctctgaaattttattgccatacaatagatgccagtaattttttttttttttttttttgagatggagtctcgctctgtcacccaggctggagtgcagtggcgtgatcttggctcactgcaacctccgcctcccaggttcaagccattctcctgcctcagcctcctgagtagctgggactataggtgccgacaccgcgcttggctaattttttgtatttttagtagaaacggggtttcaccgtgctctcgatctcctgatctcgtgatctgcccgcctcggcctcccaaagtgctgggattacagatgccagtaatttaaaatgcctgccttccatgaatgcacagttacagtcaaacattgcagttatctagacaaattatttgttaatgtacataaatgttgccaactagttgtaatgagtaaacatttctgttattgtgttgcagttttatattagtgttttttgtagtgtaagtttcctaacatcagtttattgtgcctattggttttttcttatatattatgttttgtatactttaagttaatgtggagtttaattaaaagataaatgagccatgtctatcacagtcaaattatatatatgtgtgtgtgtttatatctataaatatgaccccaattttggttataccttgtatatattctttcttagctcttttttttttttctttgagaggaagttttactcttgttgccgaggctgaagtgtaatgcacgatcttgactcactgcaacctctgtctcccgggttcaagtaattctcctgcctcagcctcctgagtagctgggattacaggcacatgccaccacacctggctaattttgtattttttttttttttttagtagaaatggtatttctccatgttggtcaggctggtctcaaactcctgacctcagttgaaatgcccaccttggcctctgaaagtgctgggattacaggcgtgagccgccttgcctggcctcttagctcattttcaatgttggttttatcttgtctaagttagtagccttggaaatagtcttattttcaccatgtgtttaatgatgaatatatatttcctttgtgtgagataattcttttgtgatttgaaggtaatttttaaaaaagattcataatcctgtattgtctccagttttttaaaaaataattgttttaaaaaaacataacatataatttaccttcttaaatccatttaaatgtacatgtcagggcgaggcaatgtggtggatcccttctgtaaaaccaggattttgagaggccgggacaggaggtttgcttgagcccaaaagattgagaccaacctgggtaaaatatggagacaccctctctacagatatttttttctaagaaatagcaaggcatggtggtgtgcacctgtggtcccagctacttgagagtttgagggtcaggattacttgacgctgggagtgtgaggctgcagtgagccataattgtcccattgtactcaaacttgggtgacagattgagaccttgtcttaaaaaaaaaaaagtgtatatttcaggcatatcatgtatattcacattgttatgcaaaagacttctagaaattttacatcttgtaaaactaaaactcaatatccattaaataacatttacccattttatgctctctttagcccttgagaagcacttttccactttctgtttttacaagtgtaattgtcttatatatctaagtgaaatcgtaacatccatcatttctttactggtttatttcagttggcataatattctcaaagtgtatcttcaaatgtgacgatttttttcaaggctgaataatattccattgtatcaaatatgtcttcaggttcctatgttatgtattttagatatagattcataaatggaatcactttatttaataatttatattatttgaagtacatttataacattataaaataattggtacatctttattttccaccgacaatcaacccaactaacttttgtatttttagtagagacgggatttcaccatgttggtcaggctggtctcaaactcctgacgtcaggattcacccacctctgcctcccaaagtgctgggattacaggcttgagccaccacgcccggccaagggttttatttttattgcatcatcaacagatttggtgttttcaaaaaattgatagtggccatttaaatgagtgtgaggggattttgttttttattatgacttttatgcatttctctacaaattagttttgagtgtcctttcaaatttttgaagaaaatttatttcaatttgtctatttctaaataaagttattcaatttgattgttcagtttttcttttctttttttttttttttttttgggagatgaagtcttgctctgtcacccaggctgaagtgcaatggtgagatctcggctccctgcaacctccgcctcctgggttcaagcgattctcccacctcagccttgtgagtagctgaaataacaggcgtgtgccaccatgcctggctcatttttgtatttttagtagagacagagtttcaccatgttggtcaggatggtctggaacacctgtcctcgtgatccgcctgcctctgcctttcagtgtgctgcaattacaggtgtgagccaccacgcccggctattgtttggttttaaaagtttatagtttttgaatattgactcccatcacatgtaatttgtaaatattttcacccattttctagaatgcattatccatcttttaaatatttatatgtgcagaaatgttgaagtgtagtgtagttaaattttttgtttttttctttggtgctcatgcatttaattttatatctaagaaaatggccccaagactgatgtcgtgttttccctatatattttaaagagattaagaagttatccggtcgggtgcggtggctcatgcctgtaatcccagcgctttgagaggctgaggtgggcggatcataaggacaggagttcaagacaagcctggccaacgtggtgaaaccccgtctctactaaaaatacaaaaaaattagctgagcgtgatggcgtgcatgttaatcccagcaactcaggaggttgaggtgggagaatcacttgaacccaggaggcggaggttgtagtgagccgagaccatgccactgcactccacctgggctgcactccagcctgggcaacagagcaagactctgttccaaaaaaaaaaaaaaaaaaaagttatcttcctatgtctaatgaaaagatttttcacatatggtatagagaaataatcgaacttcattttatcgttatggatgttcagctttcaacataattttttgaaaagattatcttttttctactgtgtgctcatgttaattttgtgggagattatttggccttacacagaagggttcatttctgggctctctattctgttctttcatctctttatctgtctttgtgtcagtaccaaattgtttttgttattgttgattttaatgtgtttcaaaatcagaaaatataatgtctctgttgtttttcatgggtgtttgtctatagttcataataaaattttaacattttaaacaatgtttccttaaaaaacccctatttggatttatataaaaattattattttttgagatggagtcttgctctgtcgcccaggctggagtgcagtggcactatctcggctcactgcaacctctgcctcccaggttcaagcaattctcctgtctcaacttccagagtagctgggattacatgcccagctaaatttttttgtatttttagtagagacggggtttcactgtgttgcccaggctggtttagaattcctgagttcaggcaatccacccgcctcagcctcccaaagtgctaggattacaggtgtgagtcacctcacccggccataaaaattatattaaatatgtctaccactgtaggttgtattgacattttgaaaaattaatgtttttttattcctgagcaaaaatatgttgaaaagtgtgttttatttttatatatttttatattgttcagttttacttttaatttctagtttaattcagttttggtcagacaacacaaagtgtgtaattttggtcttcttaaatttatttgttattgttgtgtttgttgtggtttttgtttgtatacaggatcttactctgtcacccaggctggagtgtactggcatgattttggctcactgcagcctcaacctactgggctcaagtgatctttccacctcagtgtctccagtagttgggactacaaacataacgtaccatgtctgaataattctttgattatttgtagggatagagttgcccaggctggcctcaaacttttaactccaagtgatcctcccaccttggtctctctaagtgttgggattataggcatgagctacaccacccagctggcattcttaaatttgataaaacttagtatgtgtcctaacagaatacaccagctgcaaataagaatattgtgtattttcttgcttttgactggaaagttctgtactcatctgttaaacctagttggtctataatatggttttgatgttcatgtcctccaaaccttatgattaaatgcaatttttaatgttggatgtgagacctggtgggaggtgtttgggtcatgggggcaaagtcctcatagatagcttggcaccatcctctcagtaatgaaaatgtttatactccattaattcaaatgaaagcaggtttattagaagaacctggctccttcgcctcatacttgctctgtctctcatcatgtaatatgtgcagttactcttcgccttcaatcatgactgtaagcttggtgacactctcaccagaagcagatgctggcacactttctacagtctgctaaattgtgagccaaataaatattatttctttataagttatccactctccagtattcacctatatgcaaaataattgatacagtctataatgttgtctaggttttctgttttcttattttttgtttaatgtgaattttctattacggaaaatggggtcttgatgtctacaattattatgttgctatgtatttcttgctttacttttgtcaatatttactttatatattttggagccctgatattgtacatacacatacagatagatagagagatagatagatagatagatatagtagttatacatttgtggtaatatcaacccattttaccaatatatactaccaatgtttgtctcacgttagcacttgacttaaaatatattatgtctaaaacccaagtgtagttactattttcataaaatacaggtttttgcactatgtaattttcagcctatttgactcagtgctaaaatgagtcccttgtaggtggcatatggtttgctttttcttaagccactaaagcattttattttttctttttataatttcatttatttacttgtttattcatttatttttgagataggtctcactctgtcaaccaggctggtttgcagtgttgtgatcatggctcacagcagcctcagtttctcaaactcagaagattctctcatttcagcctctcaggtagctgggttacaagtgtgtagcatcacacctagctagttttttttgtatttatggttgagacagttttgccgcgttgccaaggctggtctcaaacttctgagatccagtgatcagcccatcttaacctctcaaagtcctgagattatatttttttctattaagtagtttaatttatatttaaaattatttattaaaaatgaagttactacttttattgtgattgttttatgtgttcctcagtggtattttttatatgttggtttattgccttaaatttcattttaattgtgtagtgatgtgcttcaattattttttatatcttgttttgcatagtttctataaatattatcttcataatcatcttgtgtattcgtctgtttttatgctgctaatgaagacatacctgagactgggcaatttagaaaagaaagaggtttattggacttacagttgtgtgtgactggggagacctcacaatcatggtggaaggtgaaaggcatgtctcacatggtggcagacaagagagggagcttgtgcaggaaaactctgccttataaagccttcagatttcatgagacttattcactatcatgagaccagcacagaaaagacctgcccccatgattcaattaccttccaccacgtccctcccacaacatgtgggaattaaagatgagtcttgggttgggacatgggcaaaccatatcatcttaaaaaatggagtttacatgaaacatcttaaaattaaaacaatatatttatatctcatgacaacttcaattgaatataaagattatacctctatatttttcagtttattaatgttaaaattattttatattgtgtattaacatatttatgcaggtttttattctgttttaaatattctacagaatagctttaagagttatatgcatcatcattataatagtaaaaatttctatatttgtatatttacatttaatagagagctttattttatatatggttttatgatgctgtccagtagtatttttaaacaaaatggacttattatagcagttcttactatatgtagagtctcactgtattactcaggctgacctgaaactcctggcctctagtgttctgatagccttggcctcctaaaactgtaaaattagaggcatgagccacggtgcctggccaccatgtaccattttttttggtagaactgtgctactggtgatgaacacccttaccttttattttggattttttaattttcatctttttaaagagaaatacatttaaatcaaatattattggttagaaatattttttccttttattacatcaaaatttgggaatttttatcttcaagtaatctctatgttatttttttcccatattcttcctctgagattttcttaatgaatatattgatctagttgatggtatccaatcacttttacattccatgttttaattttgttttggaagtttatatttttatgttatatattttagggtatgctaccacacatccattaattgtgttttgattttttagtatatattataattgtgcatgccaatattttaactttatataatttaagacattgtggagcaaaatcatatatgaattagccatatgtctttttctgatagaattatctgtatgtttgtttgcctgtataaatgttatccttgtatttttttaataacgtgtatatttgttgtgtaagtttgttgtgaatggttttctaatcctgtgtagatgtgaagtcataaaattattgtaatttcaacatcctatttatttgtgagtctatgtaatttttgtgtggtagaaacatttttggatttgaatataatttaaaacaatcataattatttatctcttttaggtattattgtttatttttgcttgtctaaaaaacacgacaaaatttaccacaaaatatttttaaatattcagtttagtcatattgtcttgacattgtaatgcaacatattgctaaaatgtttctatcttgcaaagctaaatcttaatacgtattaaacagctaccaatttttccttctttttttcttttttgagatggagtcttattctgtcaccctcactggagtgcagtggcgtgatctcagctcactgcaacctccaccttccaggttcaagcaattttagtgcttcagccttctgagtagctggggctgcaggcacctgccaccatgcccagctaactttttgtattgttttagtagagatggggtttcaccctgttagccaggatggtcttgatctcctgacctcatgatccacctgcctcagcctcccgaagtgccgggattacaggcatgagccaccgctccccagccaaaaccgcaactgagcttctttatttttacatcattttttctaacttttaggatctgtcagtttccttttgtattttttacctccacagtttccgtttttatgaaatgttaaatatttttgttctcgtcctcatttttgtgattttccatacttgtctctgttcctgttttaatcagtattattcaatttattaccaattcttaaaattaatgtataaatcttatttttttatggtttctttcagaaaattttatgatatttttggtgggatgatactgctatattttgtatatattataagctttcagttttttacattagaaaaatctacctgtcaaaatttttataatgtggctttgtcctggcatagtctgaaaacaattgtcttggctcatcattatggcagtttttcaaacatattcttaggacctgtattgtctgaaattttgtgttcagtttttagttaagagagtttattcatattactttgtaggagtcagtaatcacttgctacacctgttccttttctgtggtactgcagtctggcggctgctggaacatttctctttggtctcagtggactcaaactctcattccgaagtataccaccatttctgtcagcactttatgtcatgagagacagaaaacagtgtccaaaaaaagcccctaaaagccagaaatgataatgaatgtgccagtattttacctttcttttaaaacagaaatgaagagtttgcaatttacttctaaaggcactatgttatagtgggaagcaggaaaagctgtgttgggtaaatttagacttttctttttcttctatgtggttttttgcattgtgctcttctggaacactgcacacagtgaatgttcacatctgtgaacatttcccacagatgtattttggtttgtaagtttttgttacatttaaatgtctatgaaagaattagggtctgtggtattttgcaaaaccatcttgtttttgtaggttgtataattttataggtaagatttttaaactatatttatgtcagtatagtaagtggagtaaattattttaatttttttttaggtatatgtcctcattttgctcaagacatttggccagagcagggcgtggaagattcttttcaaaaagtaatactaagaagatttgaaaaatgtggacatgagaatttacagttaagaaaaggttgtaaaagtgtggatgagtgtaaggtacacaaagaaggttataatggacttaaccagtgtttcacaactacccagggcaaagcttctcaatgtggtaaatatttgaaagtcttttataaatttataaatttaaacagatataagataagacatactagaaagaaacctttcaaatgtaaaaattgtgtcaaatcattttgcatgttttcacacaaaacccagcataaaagcatatatactacagagaagtcctacaaatgtaaagaatgtggaaaaacctttaattggtcctcaacccttactaatcataagaaaactcatactgaagaaaagccctacaaatgtgaagaatatggcaaagcttttaatcaatcctcaaattatactacacataaggtaactcatactggagagaagccttacaagtgtgaagaatgtggcaaagcatttagccaatcctcaacactaaccatacataagaggatacatactggagagaaaccctgcaaatgtgaagaatgtggcaaagcatttagccaaccctcagcactaaccatacataagaggatgcacattggagagaaaccctacaaatgtgaagaatgtggcaaagcatttgtttggtcctcaaccctaactagacataagaggctgcacagtggagagaaaccctacaaatgtgaagaatgtgccaaagcttttagccaattcggacaccttactacacataggataattcatactggagagaaaccctacaaatgtgaagaatgtggcaaagcatttatatggccctcaaccctaactaaacataagaggattcacactggagagaaaccctacaaatgtgaagaatgtggcaaagcttttcatcgatcctcaaatcttactaaacataagataattcatactggagagaaaccttacaagtgtgaagaatgcggcaaagcgtttatatggtcctcaaaccttactgaacataagaaaattcatactagagagaaaccctacaaatgtgaagaatgtagtaaagcatttagccgatcctcagccctaactacacataagaggatgcacactggagagaaaccctacaaatgtgaagaatgtggcaaagcttttagccagtcctcaacccttactgcacataagataattcatactggagagaaaccctacaaatgtgaagaatgtggcaaagcatttatattgtcctcgaccctatctaaacataagaggattcacactggagagaaaccctacaaatgtgaagaatgtggcaaaacttttaatcaatcctcaaatcttagtacacataagataattcatactggagagaaaccttacaagtgtgaagaatgtggaaaagcgtttaatcgatcctcaaatcttagtacgcataagataattcatactggagagaaaccttacaagtgtgacgaatgtggcaaatcatttatctggtcctcaaccctttttaagcataagaggattcatacttgagagaaaccttaaaaagggtaaagaatgtggcaaagcatttatatggtcctcaacgctaaacataagaggatgcacactggagagaaaccctacaaatgtgaagaatgtgaaaaagcttttaatcctcaaatcttactaaacattagataattcacactggagagaaaccttacaagtgtgaagaatgtgggaaagcttttaatcattctcaaatcttactacacataagataattcatactggaaataaaccctacaaatgtgaaaaatgtggcaaagcatatggtccacacccctaagtagacataagaggatgcacactggagagaaaccttacaaatgtgaggaatgtggcaaagcctttaaatgttcctcaactgttactgaacataaagtaattcatactgaagagaaaccctacaaatgtgaaaaatgtgtcaaagcctttaagcagtcttcaatcctgagtaaccataagataattcaaactggaaagaaaccctgcaagtctgaagaatgtgggaaatctttcttttttttccattgcacctttattgtttattctgttcactgttcagaattttcatacagtctttctagaatcaagaagggtgtacagtggtattcctgtggctttctctcctctccagctcctctcttgttcagcagcctccggacccccaagggctaaggaatcagacacaccgggtttggatcctgactccactaggagccatgtgatctcagggatatttcttgatctctctgagctctttttcctttttctgcaatgtggggaaaaggctccctctctcacagagttactaccagaattcaatgactccaagtatccaaagcatctggcacagtgcctgggcacacagtatgcccagatgcaccttagcttccttccttctggcagggaaaagatacctgataaagccagagccagctgcttaggggcatttgctttataaagagcctggtccctttaacagaggccaagaaatgactctctaatggtggaatttcagacaccatagcatgggtgagggagagatctggaggcatagactatagaagtctcagaatcatttgaatccagccaggcagactgctgctgcttctgcccaggggcaaggctggtgatacagtttggctgtaaccccacgcaaatctcgtcttgaatccccacatgttgtggggagagacccagtgggaggtaactgaatcacaggggcaggtttcccatggaatgtgggaaatcttttaacctgtcttcaacttttattaaacataaggtaattcatactggagtaaaactctacaaatgtgaagaatgtggcaaagtgtttttctggtcctcagccctaactagacataagaaaattcatgctggacagcaaccctacaaatgggaaaaaattggcaaagcctttaaccagtcctcacatcttactacagataagataactcatattggagagaaatcttacaagtgtgaataatatggaaagcctaaaaaagtcctcaattcttaacagatataagattattcatactgaagagaaactctacaaatctgaaagatgtgcccagtgcctttgacagcatctcaaacttttctaaacaaaatcatgctgctgacaaatcctagaaatgtgaagaatgtgacaaagcctttaaatgattgttgcacttcattgtatgtaagatcatttatactggaaaaaactaccaatgtgaacaatgtggccaagcttctaaccaatgctcatagcttattgcaccggtaagcatttatatttgagaacaaatgtacaaatatagacaaagcaaaaaagccattaatacctgctcacatcttactcaaaatcagagttcatactgaataaaagcattaaaaatctaattaccgtcaaaagatcagaaaatatgtctttaaagtgcagaagcatatttattttgaaaaagcattacaaatatgaagagggttgtaatacatttacttgtctcacagatcttattgtacacattttgtactagaggaaaaccctgaggcagttattaaaattttgttcaacatcagggagtttatattgaagaaaaccctgcaaatgtaatgaatttggaaaaacattttttcaaaaactacaaattatgaaacaccaaagcgttcatactaaaatatatttttgcagatgcattaaatatgaaagatgttcaatccaaaattaagtctatgtaaatatcagggaataattcacagtagaaatatttagggcactcaaactttagacattacactaaatcagtgctgagtataggaaataatacaaactaaagttcgtgtaaacattatttgtatataactttaaaagaagaatattttttggagagttataattacaatcaaagtataacttttttttgaaaatacagaattttaaaaaagcaaataatggagttaaactcttaaattacttcatgctgttccatcattcctggtgtattcacatgtgaaaacatgtgactaattgtagctgcattaaagatatgagagattcttttttattaggtaggcctttatgactttttctatggaaaggtaaggacattaaaatgtaagatacatgatgaaaatttaagtagagaggctctttgggttaacttgtaatgttgagtgatgcatgaggtaggtgttcagagtaatatttttatgcattatcatgaaagaaaaactttttttttttcatggcagtttgatttttatttttattttaatttattttttatttatttattttttaaggtcacagatcaacaggatcccaaggcagaagaatttttcttagtacagaacaaaatgaaaagtctcccatgtctacctctttctacacagacacggcaaccatccgatttctcaatcttttccccacctgtcccccctttctattccacaaaaccgccattgtcatcatggcccgttctcaatgagctgttgggtacacctcccagacggggtggtggccgggcagaggggctcctcacttcccagtaggggcggctgggcagaggcgcccctcacctcccgaacggggcggctggccgggcggggggctgaccccccccacctccctcccggccggggcggctggccgggcgggggggctgacccccccacctccctcccagacagggtggctggccgggtgggtggctgacccctccacctccctcccggacggggcggctggccgggcagggggctgacccccacctccctcccagccggggcggctggccgggcggggggctgacccccccacctcccttccggacgaggtggctagcgggcggagaccctcctcacttcccagatggggtggctgctgggcggaggggctcctcacttctcagacggggtggctgccgggcagaggggctcctcacttctcagacggggcggttgccaggcagaggggctcctcacttctcagacggggcggccgggcagagacgctcctcacatcccggacagggtggcagggcagaggtgctccccacatctcagacgatgggcagccgggcagagacgctcctcacttcccagatgggatggcggccgggaagaggcgctcctcacttcctagatgggatggcggccgggcagagatgctcctcactttccagactgggcagccaggcagaggggctcctcacatcccagacgatgggcggccaggtagagacgctcctcacttcccagatggggtggtggccgggcagaggctgcaatctcggcactttgggaggccaaggcaggctgctgggaggtggaggttgtagcaagccgagatcacgccactgcactccagcctgggcaccattgagcacttgaaaaacattctttagttaacattaagttagtagtatgttactgtacttttatggaataatatacagtatatttttaaattatgtgtgaacttaacttttcaattcagcatttttaacatgttaaatactatcatgaattcattgaagcattatgccactaactttaacctattccaccttactcaatggtgtaggtaaaagatggtaacaatacactatttggtaagataatggactgacatctctagtaatctttttgtcagtggctttaaattgccaataagttaaagaatgttgttcctataggttaaattttattcttatttttacatttaaatttatttttcttaatttttgtggatatgtaatatgtgtatatgcttatgccatatatggcatattttgatacaggcatgtgatatataatcttagatgtaaataaattatggagtgtgtttgtgttagtgtaagtttgaaactatttttagccaaaaaaaagtaatattggaacaaaataaatcattttaagaaggtgtctaatttactagaaaaaaaccaaaattctcaaaattactgaaagtaaatctatcctctgtactttgtattaaatttattactgtataaccttttggcttatgcttcagaatctccccatgcaaattctctgttttaacttgactgttactcatgttagaaccataattttgtttgttcgtttaatagtttttttttcttttttttttccttttttttttttttgagctggagtcttgctctgttgcccagactggagtgcaatggtgtgatgttggctcattgcaatctctgcctttcaggttcaagcagttcccctgcctcagcctcccaagtagctgggattacaggttcccgccaccagcccagctaatttttgtatttttagtagagacaggattttgctatgttggtcaggctggtcttaaacttctgacctaaggtgatccacccacatcagcctcccaaaatactgggattacaggtgtgagccaccgtgcctggcctgtgtgtaatagtttatgaaatattcattatgtgagctggtctgtaagtataagaatgattttttttttaatttcattgttccatttattggggtacaggtggtgtttggttagatgagttaagttctttagtggtgatttgtgagaccctgatggacccatcacctgagcagtatatactgcaccatatatgttgtcttttatccctcccccttcccactcttcccccccaagtctccaaagtctattttatcattcttatacctttgcattctcatatcttacctcccacatatcagcaagaacatatgatgtttggttttccattcctcagttacttcacttagaataatagtctccaatatcatccaggtcattgcaaatgctgttaatttctttttgtggtgagtagtattccaacatatatgtatatgtcatagtttctttatctgtttgttgattgatgggcattttggttggttccacgagttcaaaattgtgaattgtgctgctggaaatatggatgttcaagtttctttttcaaataatcagtatttgggtttatttctgggttctctgttccattggtctatatttcaaataatgacttcttttcctgtgggtagatacccagtggtgagattgctggatcaaatggtagttctacttttagttcattaaggaatctccccacttttttccatagcggctgtactagtttagatttccactagaagtgtagaagtgttccctgatcactgcatccacgccaacatctacagtttttcgatattttgattatggccattcttgcaggaataaggtggtatggcattgtggttttgatttgcatttcccttatcattagtgatgttgaactttttaaatgtttgttagccatttgtatatcttttgagaattgtctattcatgtctttggcccactttttgatgggattttttttttttttttttttctgactgattcgtttgagttcactgtagattctggatattagtcctttggcagatgtatagattgtgaagattttctcccactctgtgagttctctgtttactccgctgactgtttcatttgccatgcaaaacctctttagtttaattaggtcccagctatttatctttgtttttactgcgtttgcttttggtcatgaaatttttgcctagccaatgcctagaagggtttttccaaggttatcatgcaaaatttttatagtttcaggtcttaggtttaagtccttatttcatcttgagttgattttcatataaggtgagaaatgaggatccagtttcattctcctacatgtggctagccaattatcccagcaccatttgttgaaaagggtgtcctttcccacattatgtttttgtttgctttgttgaagatcagttggctgtatttgggtttatttctgggttcactcttcttttggtctatgtgcctatttttataccagtaccatgctgttttggtgactagagccttatagtttgaaatcaggtagtgtggtgcctcgagatttgttctttttgcttagtcttgctttggctatgtgggctctatatgaatgttagaatcgttttttttaactgtgtgaagaatgatggtggtattttgaaggggattctgtggaatttgtagattgctttaggcagtatggtcatttccacaaatttaattctatccttccatgagcatgggatgtgtttctatttgtttgtgtcatctatgatatctttcagcagtgttttgtagttttccttgtagagttcttttgactccttcattagatatgttcctaagtattttatttttattcagctattgtaaaaggggttgagttcctgattatttctccatttggttgctgttggtaaataaaagaactactgatttgtatacgttaatcttgtatccagaaactgctgaattcttttatcagttctaggagctttctggaggagtcctcagggttttcaaggtaaattatcatatcatcagcaaacaggtacagtttgacttcctgtttactgatttggatgccctttatttcttgtcttattgctctaggtaggactccagaactatgttgaagtggagtgttgagaatgggcatcctttcttttttctgttctcagagggaatgctttcaacttttccccattctctattatgttggctgcgggtttgtcatagatagcttttattacatgaagttgtgacccctgtatgccaactttgctgagagttttaatcataaagtgatgctggattttgtcaaatggtttttctgcatctattgaaataatcatttgatttttgttttgaattctatttatgtggtgtatcacatttgttgacgtgtgtgtgttaaaccatccctgcatccctggtatgcaacccacttgattatggtggattatctttttgacatgttgttggatttggttagctagtattttgttaagaattttagcatcaatgtttgtcaaggatattaatctgtagttttcttttctggttttgtcttttctggttttggttgtagggtgatgctggcttcacagaatgaattagggagggttccttctttccctatcttgtggaacaatgtcaaaagtattggtaccaattctttgaatatctggtagaattctgtgaatcagtctggtcctggactttttttcttggtgatttttaaattaccattttaatttcactcttttttattggtctgttcagggtatctaattcttcctgatttaagctaggagggttgtatttttccaggaatttatccatctcttctagattttctagtttatgtgtgtaaaggtgttcatagtagccttgaataattttttgcgtttcagtggtgtcagttataatatctcctgtttcatttctcagtgaggttatttggattttctctcttcttttcttggttaatcttgctaatggcctatcaattttatttatcttttctaaggagtagctctttgtttcatttaccttttttattttttcttttaatttcaattagttatgttctgatcatggttatttccttttttctgctgggtttgggtttggtttgttcttgtttctctggttccttgaggtggaccttagattgtctgtgctctttcagactttttgatgtaggcatttagggatatgaactttcctcttaccatcttcgctgtatccaagaggttttgattggttgtgtcattattgtcattcagtttgaagaatttttatgttccatattggttttgtttttgacccagtgctcattcaggagcaggttatttaatttccatgtatttgcatggttttgaaagttcctttgagagttgatttccagttttattccactgtgctctgagagagtgcttgatgtaatttcaattttcttaaatttattgaggctcgttttatggcctatcatatgatctatcttggaaaaagttccattcgctgttgaatagaatttgtgttctgcggttgtaggattaaatgttttgtatatacctgttaagttcatgtgttccggggtatagttaaatccattgtttctttgtttactttctgtcttaatgatctgtctagtgctgtcagtggagtattgaagtccctccctcttatggtattgatgtctatctcatttcttaggtctattaataattgttttataaattttggagctccagtgttaggtgcatatatgtttaggattgtgatgtttccctgttggatcaggccacttacgattatatagtgtccatctttgtctcttttaaccactgtttctttaaaatttgttttgtctgatataagaatagctacccctgttttcttttggtgtccatttgcatgaaatgcctttttccatctctccacttttgagtccttatgttaagtgagtctcctgaagacagcagatagttggtgagttcttgtccattctgcagttctgtgtcttttaattggagcatttaggccatttccattcagtgttagtattgaaatgtgatgtacaattacattcatcatgctctttgttgtctgcatactttggtgtttttttttggggagggaaggtgaggggaatggagtcgtgctctgtctccagggtggagtgcagtggcttgatcttggctcactgcaacctccacctcccaggttcaagcgattctcctgcctcagccttctgagtagctaggactacaaatgtgcaccaccacgcccagctaatttttgtatatttagtagagatggggtttcacccccatgtctagaaattcaatggcaataaatattgttgcccacatattaaaatccaatatccaggaccaattttaaattcaatggtattggatagcagagctacagacccagaaatgtaaaatatgttctaaatattctaaaggttctatcagaaaacagtattttgaaattaaatatgtagaagctttcataatattttctctactgaacatggtactaggttgctaactggagaatcccagcaagtcatattacttttttctaacaaaacaggccttgctgtctctaaccctgatctgatctcctgccttgagcaaataaaagagccctggaatgtgaagagacatgagacagtagtcaaatactcaggtaggtaagcatgaatgaagccgataacacagatgacaggttcaaaggtcaaaaagaatgccagactttaaaatgtgatatgggatgctctgcttcagtggaaagatttcctaaaaagcctttttttttcctctagctctgaagtaggagcatttttgtcccatacccttaaattatttctaaggactctacttcctatttagtgattttcctttgagggtaccatgagaactaaactcctctttatggcttataaggtactgcatgatatacctgctcttccattgcttcgggggaatataaaaatatctcgagtatttttgaggaactgcatgttagattatttctcaaattttcccatcatgtctgaaatgtatgagagcagtggtgatattaagatttgtttcagaaatctcaggaacatcaatgacagaggttacttatttctctattttctgtttttaatattagcaatcctaactcaagtgatagctcattattgttttcatttgcagttgcctgttgttaggtgatattgaccactttttttatatacctattggtcatgtgtatatatttgctggcaaaatattttttgaatcttttgaccatttttctgttgggtttttattgttatacttgcctttgctttgaatttcctgtatattttgaatattaagcttttcttgtatatatggtttgctattgtgagcatgcaataaacattcaagtataggtatcattttcttataataaactatttttctttgagtagatacccaatgatgagacttttaaatcaaatggtagttctatttatagttgagactgagcatttttgtcatatgtgtgttggctatttgcatgtctttattgaaaaatgtttactaatgttatttgcccatttttcaatgggattctttattattatgatatttttgagttgtttgagttacttgtaaattctgaatgttagtttcattttggcacatagtttgcaaatatgttcatttattctgtaggttgcctatttaccctgttgattattttttttgctgtgccaaagctttttagtcccgtttgtctatttttaataataatataataaataataatacaataatagttttctttgttgtgtccttgcctaatgttggtatcagggtgaaactgacctcagagtgacttaggaagaatttcatttttgggaagagtttcaagaggattgttattcaaatacatttggtagaatttggctgtgcatttttctagtcctaagcttttctttgtcaagacatttttaattactgactcaatcatgctactcattattggtttgttcaggtactctatttctttctggctctatcttgggaggttgtatgtttccataaatttatttactctaagttttcaggtttgtgagtgtctagttgtttataatcatttctagtgatcttttgtattactgttgtatccattgtaatgtctattctttcatttctgattttgtttatttagatctctcttctgtttgtgatgaatctagctagcaatttatcaattttgtctttttgaaaaaccaactctttattctgttgataatttttattgttttggtttttatttcatttggttctgttctgatttttgttatgattttcttctaacttggaatttgtttttttattaatattctagttcctcgaagtgtgatgccaggtccttaatatgtaagctttctacttttttgatgcaggcatttaggctataaactgccctcttagtactatatttactgtatctcacagattttattatactgtgtttctatttccatcttttttcccacaaagttttaagtttcatcttaatattatttttgagatgggctttactctgtcacccaggctggaatgtagtggcacagtcttggctcactgcaacctccaccttccaggctcaagcgatctttttatctcagcctcctgagtagctaggaacataggtgcgcaccaccacatctagctatttttttgtatttttggtagagatagtgttttgccatcttgcccaggctagtctcaaactcctgacctcaggtgatccacctgcctcagcctcccaaagtgctgggattacaagtgtgagttaccacccctggccatccatgttaattatttcgtttacacagtgactgttcatgagtatgttgtttaaattctttgtaaatttatagtttctgaaatttttattgctattgatttgtagttttattctgtggtcaaggtagttaatataattttgttttgggggtacttttttgatttgccaactcttctatctcagtggtctctctaatgctgtgagtagaatgttacatttttccactattattgtattactatctgtctctttatataggtttaataatatttctttttaaaatctgggtgttttgatgttgggtgcgtggatatttagaattgttatatcctttcactgaaatgatttctttattattgggtgatgacctttatcctttttgttactgctttttatttgaagtctgttttatttgatgtaagtatagatactccagtttgcttttggtttctgtttgtgttactgtcttccaccttttacttttaatctacatgtgtcttacaagtaaggtgagattcttgtaggcaacatacagttggatcattttttcttattcatttcataaatctatgcatttcaatgaaggatttcattgatttatattcaaggttaatattaatatgtaaggttttgttactctcataatgttaatttttttctttttatctatctttgtggtttaataaagttctgtcatgttgtaatttgatttatttctttttctcttttgttttataagacctgttagttttatacttttatatgttttaatgatggtgaatatcaaactttttttttatattagaaatcccttgaacatcttttgtaggcccagtctagtggtaattagtcagggtaagattttatatctttttcatctgtgaaggttaatctagcttgatgtaaaatatttggctggcacttttctttcaacactctaaatgtgccatctcattctcttctaaccagtaaagtttctgctgagaagtgtgcttttagtctgatggggttttctttattttataattacttctttcactttcactttagatattcatcatgtgccatgatgaagtctgttttgcaatgtattttgctggtgattgctgagcttcctgtatatgtatgtctaattctattggtaaagttgggaagttttcatcaattattttcttacatagttgttctaaactttttgatgtgttttatttctcagaaacactgataatttttaagtttattcactttagtcgcaaacatctcacagtctttgtttattcttttctccttatttttgtctgagtagattttttataaaaacctctttgatggcagtcttacactgctagggtcatcagaaaggaaaggaaagggaaatagaagggaaccgccaagtgggtattgaagcaaaaagagctacaaggcaggaccctccattagaaatgcttatagaaggaccacctagtatgggctaatcccctctgggaaaccaagccccagtactcagcagaagaaatagaatggggaacctcatgaggacatagcttcctcccctcaggatggctagccaccaaagaaggaaaaatactttcacctgcagctaaccaatggaaattacttaaaacccttcaccaaacctttcacttaggcattgatagcacccatcagatggccaaattattatttactggaccaggcctttccaaaactaccaagcagatagtcagggcctgtgaagtgtgccgaagaaataatcccctgcactgcaggccatacatttcaatccctgtatctttaacctccttgttaagtttgtctcttccagaatcaaagctgtaaagctacattcttcaaatggagctgcaggtgcagtccatgactaagatctaccacggactcctggactggcctgctggcccatgctctgatgttaatgacatcgaaggcacccctcctgaagaaatctcaaccgcacaacccctactatgccccagttcagcaggaagcagttagagcggtcattggcccacctccccaacagcacttgggttttcctgttgagaagggggactgaaagacaggactagctggatttcccaggccaactaagaatccctaagcctagctgggaaggtgaccgcatccacctttaaacacagggcttgcaacttagctcacacccgaccaatcaggtagtaaagagagctcactaaaatgctaattaggcaaaaactggaggtaaagaaatagccaatcatctattgcctgagagcacagtgggagggacagtgatcgggatataaacccaggcattcgagctggcaatggcaaccccctttgggtcccctcccattttatgggagctctgttttcactcttaaatcttgcaactgcaaaaaaaatcaaaaaacaaaacaaaagaaaaaaatcctctttaaaggtctgaaaatttgggccatgcacggtggctcacacctgtaatcccagcactttgggaggccaaggtgggtggatcagctgaggtcaggagttcaagaccactctggccagcatgttgaaaccccgtcgctactaaaaatacaaaaattagctgggcatggtggcaggtgcctgtaatcctggctactcaggaggctgaggcaggaggattgcttgaacccaggaggcagaggtagcagtgagcagagattacaccgttacactccagcctcagcaacagagtgaaactctgtctcaaaaaaaaaaaaaaaaaaaggctgaaattccttttatgcctgtttcagtctattgtattgttgaatctttgaatgtattttctttttccttcaatctttcagtttcacaatttttgttttggtttcttttaaaagatatccatctccttggcacatttcccacttatactctaaatttatttatttatttttgatttggtttttgggtttctctcacatctctttgagcttcttttaaatatatattttgaagcctttttaaggtcttttaaagtaatttcaatgatttttttttcttagaatactggaggattattgtgttcctttgaaagtgtcataaaccgtgcttttctgtgtttcctgtgtctttgtgtgtctttttgttgatttctgtacatctagagaaacagttccttcattttatttttgaatttacgttcatttgagaaagcttttttttttttacgttattaccatgatgtttattgcatagagccatttggctttacttttgggtttgtgcataggaaagactctgtgtaagtttctcgagtataaatataatatatatatatacatatatatatatatatatatatatatatatatatatatatatataaaaccaatgttttactggcttaggagtcatcttttctcttaggttgatttttaattctaagtctcagaaaataatttatctattttgtgttggtcattgagggccagcactcctgacgtaaaagggtgagaaggtaggatggtggtgtatgatgacagattacttaatagttataatgtacattgagtgatggataccctaaaagccctgactttaccactatgcaatctatgcatggaactaaattacacttgtacccaacacatttgtataaataaattaaaaacatccactatttgggtttgctatcttgcttattcatacataaaaatacattataaatgtttcctttgacattattattgttacaggagttgaaattatttaggcagatagagcaaaaaagtcattggtaaagttttctttttaataaaaagaagtccacaaattatggtttttttttttgtttgtttgttttgttttgttttttttgttttaacaaagagcagcctgtaaaattgagctgcagacatagataagcaagctggaatcttgcatgaataaatgccggcagctgtgctgcagcttgctctgcagtgaacaccaagaaataagtattcagacaattacagctgaaagggaggggagcagctcctccaagacagtgctgctttaagattcatctgccaagtatttattgagaaggctagttgaactacaatttagacaaacaagaaacatctacaaggtggctatttggggtcgggtcatgaggcacatatggccttgtttataacatctaaaagcactcaaaccacattcttaggaggctgtgttcagcactccttattacaaattctattccttgtcctattttcagggtcaaggaattacagtttcatgcacaaacaacatacacacagtgcctcagtatttttccatgcctcaacctcaaatgccttgtacataagcttgaatgtattgtcatacacccctcacatttcccccttctttaattcttagaacatgcggattatccaatgcaaagtaagcttctatcattcttccctggtcatagttggttgagtggcagcacagagccatttgcagatgcctaaaagatacaaaaaaggataaacagtggctatcacccaaatttgtatgtttagcccagacaaccaagtatttgggttcaaccactgaaagtcttgtaataactgaagggtgtttgtaattgctgcaaccatcgcttaaactgtttatttaattcacactaacgagtagaaactcgagaagacaggtggtcgccgtaagccctgtgtaggtgtgccttcactctctcccaggtatattgggagctattatatggcataaatgtgacacagatggaattatattgctaatcacaatgtaaattttgacaagtaacgaatgcctgctgtggatcccctagccattcagtggcagcttcaagggcctctaggtgagataaaatatttttatcagtatttacatgtttttgaaattcatggattacattgtataccatgtggttcaccactgaggctgtatgaatagattccgtcaaagagacagctgcagtagtagcagttgttagtataataatagctgaaactaaaaaggcaattagagtggccagaaatttttttttttttgagtatgagacaatgcttttctaaataactgcaagatagaatcccctttccagttccgggttggatatacagggagccacaatcctgaccaccactttaaaataatgacatagggccgggtgtggtggctcacacctgtaatcccagcactttgggaggctgaggtgggcagatcacaaggtaaggagtttgagaccagaatgaccaacatggtgaaaccctgtctctactagaaatacaaaaactagttgggcgtggtggcacatgcctgtaatcccagctacttgggaagctgaggcaggagaatcgcttgaacccaggaggcagaggttgcaataaactgagatcacaccactgcactccagcccatgtggcagagtgagactctgtctcaaaaaaaaaaaaaaaaaatcatgacatagtttataattgtgtaatgttttgatgagacaagcatgtagcgtatcaactactggaagagacagtaatactataaaaggattgattctgttctgtgttaggaatatcctgcgcaaacaaaagtatataagggtgtatagcacaaatcaggactgtatcagtaacattattgtgcaaggagagggtgtagttgtgaccgctataaatgtaatcacttttattatgaaagaacccattcaaaaaagggaagacctagtttccaaatttgggtatgagcagggcttaaaacttattccccttttgattgtaatattcatcctgaaatcccatactctgaccaggtgatggaactattggatggagtcccaaatccaatagtctgatttgcagacatgagatatccatggggtccccagtcaagtaaggtgccattatcaaacagaggtccttgatgcggcacaggttgtctgcatggggaccactggacagcctcaaacttatgtcgccagtcttttctcagatggcatatcagaagatcaggcatttgtataatttcattagaaacctcagtaagattactggtaacagcagaaataaaagtcaagtttgcaggcttagcatcccttttgggctgatagtaaagatactcctgaggaatgagagtaatacacttaggtgcccatgtagagaaacagagaggaggattgctagacaataaagtcaaggagtcattaagtttaatccatcccaaatttccagttagggagtaagacaggggcatccatcgacctcccatccaagaagtattataagatgacaaaggcgggtcagcatcccaccacataataacattgaaaattgagggattcagaacatgactccaataaacatgttcttgagctaagcccagttggcaaagaacaagaattaccagccaccccaacatccatgtctgtcttaccttctcagaagctcccccaattaccatcagatacataagaaactggttctctgcagtttcaggggctcccatagatgcaagccagatagttccctgttggtccagtttctttagctgtccccaggtaatgtcaggtgccttccaagttatcactgtcagttttggtcgattctccaatgacaggtccttcatcatcaggaggggctttttcagtagtctctaactcatattatggcttcactcattttatggggatccactctagtcctgtagttcatgaaatacaaaccgcaccttgaccccattgcaatgcctcataaagtccctcccaattccctgtacaaatgtctcgaattaacacctttcattttgtgacctcaaacagcttcatcctatgaccaatagccatctggccatcttatccaatattcaaaaaatgaagagtaaataaaatttttgctcattctcgaggagagagctcccatattccccccttttcatttattaagatatgctttaagggtttgatgagcttgttcaacaatggcctgacaggttgagttataagaactatcagttttgtgttgtatgtgccaaagttgcaatgcatataaaaagctagtgctaagatagcaaggaccattatcagttttaatagtctgtggagggcctaaggtcataatagattcaaaaagataagcaattgcatctttagtttcttctccagtccatggagtcacatatatgaggcccatataagtgtccacagtaacatagagaaatttaaagcatccaaaaggtggatgctgagtaataccagtttgccaggtagcattaggtaccagaccttatgggttggcaccaagtcccaatgaaaaaagggagagagaatgctgttggcaatcaggacaagttttaataatcatgcaagcttgatcaagtgttaaatgaaacttgtttaagactgtaggcagactgggcacagtggctcacacctgtaatcccaacactttgggaagccgaagtgggtggatcacctgaggtcaggagtttgagaccagcctgaccaatataatgaaaccctgtctctattaaaaatacaaaaattagctgggcatgatggcatgagcctgtaatcgcagctactcaggaggctgagacaggggaatcgcttgaacctgggaggtggaggttgcagtgagccgagatcacatcattgcactccagcctgggcaacaagagtgaaactccatctcaaaacaaaaacaaaaacaaaagactgtgagcattctgatgaaaaaaggaatgatcagcttgagctcacaaatatgcaggacagtctgcaaacctcatctgtgtttgtaccagagcatcagctggagtgttccctgctgacaagggaccaggtagcccagaatgagagcgaatatgtgtgatataaaaagggtgatgatggggacaaaggagctcctgtgttgtgagaaacagggttagtaggggttcattagtaatgccttttagatgtgtgagatctaaatgagtaatactatacaccgcataagtggaatcactaattatattcatgtcttggtgaggaaaagtttgtaacaccaatattagggcacctaactcagcctattgagtagttttgaaatgttcctggattttgtgctgccaattttgcatggcatcttgccacactatagctgactttcccattttccttgaaccatctgtaaagacagtagtggtgtgaagcaagggctcagagacaacaatacatgcaaatttaacaggcacagtttgtaaaaagttcaggagcttagaggctggtaaatggaaactaatattaccaataaagttgatcattgcaacttgccaatcaagatcacaggctaagagagtatgaaattgttccttgcttaaaggtaagaaaagagtagtagggtcatatcatgacaattggatgcaatgtcggcatcccgttgtgagaagctattaaatctgtggtcttttgtatgtgtttagggagggggttacaagacaggtaaagctgccccaaaggagaaacatttgttccaacttgcccaagcattcctgtaggactttgaggggtattaaagatcaaaagatgtataggtctgtcaggatctagacccaatatacacctttgggtcaaggcttgctccacagcattaagctcagcctgttccagccaagagaggtcttgcagtgaatttaaagcagagtcacctttcagggtgtcaaaaagattaaagtaatttgtaggaatgcctaaataggatcatatccaactaatctttcctaggactcaatatcatgtattaagggttaagtgctgtggaagaattaattctgtaagttgtggcctgagggtagtagataagagccacagagtatatagagccacagagccatcagctggactttttcttgtgcaataatgagaccatatagtgacatatgctgtactaccattgcatgaagttgatgcagtaatgactgatgctgagcagctaccaaaatatcatccatatagtggaaaatttttgcctaggggaaggattgatgcacaggaagtaagccttcatgtacgtaaagctgacatatagtagggctattcatgatcccttggggtagaactgtccattggtgacattaaactggttgcagagtattgtaagtggaaacaataaaagcaaaattttctcgatcttcgggatgcaagggtatggttaaaaaaaaaatcctttaggtcaattaaaataagaggccagtctttggggatcataactggagaaggtaatcctggttgcaaaggccccataggaaacattacagcattaatagcacagaggtgatgcaataacctccactttcctgacctttttagaatggtaaaataggagtgttccagggactagtagtaggctcaatgtggcccgtgtctagttgttcttgtacgagacattggatgtgttgcaatttttccttcttaatgggccacttctccacccatagcaggctagtagttttccacttggttttgatacttttcaaaggagcagtggcccctaccaaaaagggggcaggacagagaggtttaagccccactgttctaggccatctcattaccacagagaaaatagaatctcttaagataaagggctgaacatgggtgaccttgccttccgggcccaaaagtggaagaatatgcctactttttaatggctgttgataccctccaacacccatgacagaacatcaggcaggagaggcccaatctgaaggccactgtcttttagctattatagtttgatgagcccccatgtcaacaattctcataaacataactccattaattgttacttctaagtatggtctatgacatgacactggagtactccaaaaaaccttcatgcctgagtggccgaatcctgaggccccacaggtctgttgaacattacttgaaggtaaggagtaagaataatctgagcaaggcaagtccctttagagatggcatggacccctgacacctgtgccataactttaatttctgctaaatagtctgaatctatgactccagagaaaatttgaattccttgaagtgtacttctgataatcaatccaaacgttcctctgggtaatgggccatagattccagtagaaatcagctggaccccatcttgctctttaagcaccatatctgatatgactgtgaggtccagccctgcgctgccagaggtggctgaagagaggttatggatgctatttctggtcctgactcagaggggaaagtcattccccaagtctgggaattggtgttcctccatggatttttctgggcattggaggtcttgcccctcttcccgtttcccaataatgggtttcatccttatcaaattttgaatttcactgattagcccagtgcttacctttgctgaatcgcaggcattcttgagagggtattttaggggcctttgatttctttgggactcccttctgttggcattctttggccatatgcccagtttggccacaattataacatgtggccccagtcatcactgcagcaaaagtctgagccagataagttgtaagtgcctacattctggcacgttttaataaacacaccgatttcagtggcagtggctcagactagggttattgctgcctgacaatccttattgcattttcaaaagccaattgcaacataagaagtttagcgacttcaggatgaggtacctgtctttcaattgcagcctgcaatcggttgataaattcaacatatgtttctgtggcaccctgtttaaccatcacaaaggaactctggaattgtcccatgagtatcctcttccatgcctgtatcgctagctgtgagcattgaggaaatagacggccatccacctgagcctaagcctgagctgaagcaaaaggccctgtctccaacagcatacatatcaagctgtatcaggatattatccaaattttgcaaggattgctgcatggctagatcactgtactctctccaccacacagtatattcagcagctgaagccaaaacttttcccagagttttccagtcatgcacagccatctcataaccatttcccagagcctcaaccatcccctgcgtaaagggtgaatgtacaccatttttgcagatacttctttttaattccttaaagacaataaaaggcaagcgctcatgccgtctcctattattttgaacaatgacagggaatgcactaaaaagcgcctcaggatcttccttcctcagtccctcctggaggcatccttctagtagggaggttttttgaggggacacggccatccagtcatataaatgttcactgcctggaggtcttatccaagaacagtcccttggacggcctccaatctactcaagggggatgggaggtgctattgcctgaatggggccaacagatgcaggtcgtgtgaagggtggaggaaaagagggcaatggcttttctattgagagaggaaaaggctccagtccgtcctcatcatcactagaaaaagtgtcttctttatgccctactgaagggagtgaagttgggggaggaactccttcctgttgttctgctttctgtgtccccttttcctttaaattttccgaattcccttcaggtgaagaaaatgggcaatctgactcaccacgatctggcatataaagagggtacaacacagaacatgccagactccaggtgatcaaaacggtaacattagtaaaatggacctgctcaaatcctcttttcaggcagcaatctgcctgctcccataactctaagtctaatgttccttggtcagggaaccaagggcattcctgccgaattaaaaacataagcttatgcaaagcttcagactctatggtgcactgaataaccttaagtaaatgttgcaccgttttaaaaaatactttctgctctttggacaactcctgatccatggtaacccgacccctggtattatagacgtcggtgctgtcctcctgaaaatgggtagggactgtcccttaccggtattccccgaagattggtgagtcatcctactccatgcataacttcaaggcaatcacgtcggagtcaccacttgatcatgtccgagtcaccacttgatcacgtccgagtcaccacttgcagcttgttctgcagtgaatgccgagaaataaatattcagacaattacagctgaacggggaagggagcagctcctccaatggagtgttgctttaagattcatccgccaagtatttattgagaaggcttgttgaactacaatttagacaaacaagaaacatccaccaggtggctatttggattcgggtcatgaggcacatatggccttgtttataacatctaaaagcactcaaaccacattcttaggaggctgtgttcagcactctttatcacacattctgttccttgtcctgttttcagggtcaaggaattacagtctcatgcacaaacaacatacacacagtgcctcagtatttttccatgcctcaacctcaaatgccttgtacataagcttgaatgtattgtcttacaacccccacgctatgccagtaggaaaaggggttgcctggggactatgcctgttcaaaatggtggctccatcttcccttttctttgtaaaccacatgtacagtaacaaccaagaaagggtgaaattaaagtaaaacttttgattgttgacttgtcaaactggatttgtatggattaataggtctagcacaggtagaagagagacaaatacttctggtttatctgatttaatgcaaatacaggcaaacctggctaagaaatgcttttcaccaaagtttgtctgcaatttgaacgctgtaggttaaacttatttaaaagtactctggacagattcacttgtaatataagcatgttgtagtttctggtgtttaggactgatttctgtttatttagttttctgaagagacacaagagacagccctagctactatcagacttcctagagacaaattgggcaaatgagccctacaaaattccatttactttaaatataataaataataatctctaaacataagaatttgaccagcgttaaccactttactttcccaatgcactgatacttctccttttttcttagcataacacaaaacaaacacatgaccacacactatccactctccagtgcagatcagagtaacaaaggcacaaagcaagcttcagaacacacagaccaccatgttcaccacatctacatttagagctgattaagaagagaagcaaaatcaatgagaagctgacattagtgactaccctgttttcagcacctattgtcacaagaagaccaaacactctcattttaagtcagagcattcacttttttggaaaaaaaaaaaaaagtaactttacagcatatatcctgatctctcactctttgcaagatgacactggctttgggcatattacagacacccttaagacacatcgcctggcctggcttacctgatacaatttttaatttctctgaagtaaactcaaattttaaacatgtatttctttattaacttatttcattaatttcctcggggacttaacagaaaatatattcaattttcattcacttaatcttaccacaatagatggtgtaacatatccagaagacagccatatgtaagacatgcccatactccgaagcatggaaagcttaacacaccagggacttgaggaatcaacactataacagtgcaaatacacaaatatttaaggaaaaatacgtcacccaacagacagcatctgtggtcaccactatccagcattctccaaaataagtagctgttaatggcttatctaaaagttggcttatatataattgtcaccacaaattggttctgaacataatttagattccaatttttgatattaacaacacagtaattatctggtaagatatatttatagctaacttgtaattagacttatgaatgcacgcatatgccttgggtcacagtgagagaaaaactcttgagttatttgtagagtaccttaagatttacattttcaaaacatgtccttaagcttagttttagaagtattcttcccagcatctcttcaccaaactgtatcagttttatttatttatttatttatttatttttgagatggagttttgctcttgtagccaaggctgaagtacaatggcacaatctcaaatcactacagcctctgcctcctgggttcaagcaattctcctgcctcaacctcccgagtagctgggattaccggcatgcaccaccatgcccagctaatttttttgtatttttagtagagatggagtttcaccaagttggccaggctggtcacgaactcctgacttcaggtgatccacctgcttctgcctcccaaagtgttgggattacaggcgtgagccaccacacccagcaacaattttaattttaataactgaggagtggggagggctttttaaagttttattcctttctattcagtttatcttatcctatacggaaatggaataaagtgtggtgtctgtcctaatgatatttatttgtggtgatgcagaaatatctacgctcccaagcaagagatgaaaaatcatgttctccccaaaatggggaaaccagtgttacctggggcccaaagagatgttcaggctacatctgtcaggattgataccataagagaggatcatctctcgagcacagtggggctcacctgagattttggtgagtcatgtggatgacatcagagacaagcattacccaaaattagagtccctataagactttcacataagatggtcttagaatatggtggcccaactcacacagaagaggatggctgtgcatccaagtgagactgatatttttttctcaggagccgaaatcttaatgtaggagatggccactcactaagtagtcgaagcatgccctgatggaactctctggtggtcagatttcccactgtctccctgagttgcataaagcacagaacaacttgcctgcactccagcttctagcatgtaccaactcagcagaaaacacatccctgtctattttgtttcaaaaatactttgtttgccataaaaaagtgaattaatatagtaaaagcccaaggactgcctagggtaggtagcaggtctgtcatcaccagaagtatttaaatgctggccagacaaatactctgtggaaataagtttcactctttgtgaaaggggtaaaataaatctttgtcttgggcactctcagatttagtgaagatcttagcatacaatagataaacaacaacttctgtttactaaataaactttattttcacagattacaggtgaagcaaaatattgatataactctaagacattaaggtatcacaagacaacttatgttctttatggggtttcaattaagaaattacatgaaaaataagtccatgaaaggagttctgatgctctaattagcatcagaactgctctgatgggcttaaaccattgtgaaagtcctagcttgcttcctactcaaagtctcttctcatgaatcctatgcttaaaagtcaaacagataaagcatcactacatcaaacacaaacttcaacactcttaacatttaggtgtaaatctcatctgaaaatcattcaaaagctcaggtcatctacaagaaatctgttctttgcagtttagtatcagtaaattaaaaggaaagcaggaaaataataagataaagccatttaattatttttgtaggtaagaacataacattggtttatcagttacatagtattttcatgcttcatccatgccaggtacttaatttttaaccaactataacacattacaagtggagaaatagctaaaaacatagaaaacatattaactctttaaagggtagagaacatgcccagttcatatacattgcctaatctagcattccaatcttagtaagacaccaccatccacccagctataaaatctaagatcaggaagtcatctatcccttccccataccatcccatcatcaagcctctcctacctcttaaacctctatcaaatccatctgagctcccgtctctactgtcactatgcttcaggccaccaatgcttttcaattttttcataaactagccttctaactgatcttattccaaacagaaggccaataattatttccttctaccaggtctatttactactatgggtaaaaatagtccgtaacattcaaatctcaccacactacttttggggccaacactttttacagctttccagagctcctacaagcctactctaacccctgcctacttcatcattcctgtcattcccctcattcagtgtcttttcttcttccaaacacactgtacttctcccacttccctggacacatccaccttttcaacctcagcttctgtacctgctgttctctgaagcattctttttcttcctgtcacccattcttcagatattagctcaaatgtcacttccacaggatgccttccttgacctgcatcccgacatcctccattcctcttccatacacaaaggccaaactttacttcataagttcttgtcatactttgagcagttaacactgatataagtgagcttttcctggctggatgagtctctttcactgtgatatgtcctctatgatattagcaactgtctatctttgcaatgcaagtaagtttggtggtaaagacagaaccttcacaagcagataatcagatatttatggaataaataaaatctgtaaatgtgaaaaaagaatcatgggaatggtaaatttgatagtgaaaaactgtctcttaaaaagaggctaggccggacatggtggttcacgcctgtaatcccagcactttgggaggccgaggcgggtgggatcacaaggtcaggagatcgagaccatcctggctaacacggtgaaactccgtctctactgaaaatacaaaaaattagctgggcatggtgacgggcacctgtagtcccagatactcgggaggctgaggtaggagaatggtgtgaacccaggaggcggagcctgccgtgagccgagatcgtgccactgcactccaccctgggtgacagagggagactctgtctcaaaaaaaaaaaaaaaaaaaaaagaggctaaatctaatacagaactgtacttagaaaaattaaattgtaaaactttaataagcttttaacacaaaatggctcttataaaacttatttttataatttaaatacaaatcaaattcagagaaacacaagttaagcctcctttaagttacttttggtttaaaacttttgagtgttttaaccaaatacatacagatttaactgaccaaatcacagaaaacctgtttgagatgttaaaccattgtaaaacaatccgctgaaccaacaattaaaagctctaaagtaaaagataaaatggcctaaaaaatctattttctgtatcataaaggaaaatatagaagcctcctcagaaataaaactaagttagaatattatgtctaaatgtatctgtcaggtatgaatctaaattctagttagcatgcagcacttattaattgacatttacagttagtaatgtatccttaatcaattaggatttcatgttgtataaaagacactaagtcacacacaatgctaactttttctttgttaaaaatttactctttgagccctctccctctccctctccctctcggtctccctctccctctccctctctttccacggtctccttctgatgctgagccgaagctggacagtactgctgccatctcggctcactgcaacctccctgcctcgttctcctgcctcagactgccgagtgcctgcgattgcaggtgcgcaccgccacgcctgactgatgttcatatttttttggtggagatggggtttcgctgtgttggccgggctggcctccagctcctaaccgcgagtgatctgccagcctcggcctcccgaggtgtcgggattgcagacggagtctcgttcactcagtgctcaatgttgcccaggctggagtgcagtgacgtgatctcagctagctacaacctccacctcccagctgcctgccttggcctcccaaagtgccaagattgcagcctctgcccggccgccaccccatctgggaagtgaggagcgtctctgcctggccgcccatcatctgggatgtgaggagcccctctgcctggctgcccagtctgggaagtgaggagcccctcttccctgccgccatcccatctaggaagtgaggagcgtctcttcccggctgcccatcgtctgagatgtggggagcgtctctgccccgccgccccgtctgggatgtgaggagcgcctctgcccagccgcgaccccttctggaaggtgaggagcttctctgcccggccgccccgtctgagaagtgaggaggccctcagcccggcagccgccccgtctgagaagtgaggagcccctccgcctggcagccaccccatctgggaagtgaggagcgtctccgcccggcagccatcccatccgggagggaggtggggggcagcccccgcctagccagcctccccgtccgggagggaggtggggggcagcccccgcccagccagcctccccgtccgggagggaggtggggggcagcccccgcccggccagccgccccgtccaggagggaggtggggggcagcccccgcccggccagccgccccatccgggagggaggtggggggcagcccccgcccggccagccgccccgtccgggagggaggtgggggccagcccccgcccggccagcaaccccatccgggagggaggtggggggctcctccgcccggccgccgccccatccgggaggtggggggcgcctctgcctggccgccccttctgggaagtgagcccctttgcctggccgccacaccatctgggaggtgtacccaacagctcattgagaaggggccgtgatgacgatggtggttttgtggaatagaaaaggggtaaatgtggggaaaagatagagaaatcagattgttgctgtgtctgtgtagaaagaagtagacgtaggagactccattttgttctgcactaaggaagattcttctgccttgggatgctgttgatctatgaccttgcccccaaccctgtgctctctgaaacatgtgctgtgtccactcagggttaaatggattaagggcggtgcaagatgtgctttgttaaacagatgcttgaaggcagcatgctcattaagagtcatcaccactccctaatctcaagtacccagggacacaaacactgtggaaggccgcagggttctctgcctaggaaaaccagagacctttgttcacttgtttatctgctgaccttccctcctctattgtcctacgaccctgccaaatccccctctgcgagaaacagccaagaatgatcaattaaaaaaaaaaaaattactcttgaaaagaaaacccattcaaagggttcaccttgtgtttcaggacacccaccttatcttctgggtatctcttttatttctaaaaatatatgtacctctattaaaggaaagttaaaattttgattgtgtgtatttatagaagtgctttgttgttgtttttaacaataaagtaccagggtaaaataacttcccctaaaacagtaaaaatggttctttttatgagtatgatacataatcaattattatcaagtaggtacattgcacatacacatatcaagcaagatttataccctgcaggtttctggttttacattcaattttaaaaccaagaaataatggaataaaggaaagttaaattacatataaaccaacacttctattaactcataccactagtgaaacaaaactctaaataagtagagaaaatgaattcacacattggagctctgaaatgttctgggtcttttatctgtgcatttatttttcccattgaatttaaagttcaagccaaaatccattaataatgtttagaattattaaaggccacagtgtgacagattttagtgcaaccaggcattaagaagcatgcttttctctttaagctgagccaacttttattttagaatttctgtaattcaacattctttcccaccaaaacacctaaatctttttcatgtagctgcaaacgactacatgacagatgtgacaaagttgttagtttatgtccacttcctttactgaatgtggagtgaaaggccttagttttcaatttacatgtggctcttctccaaaatcttaaaaaatctcatgtttatattagaaatcaacaggcaagttcaggcatggtggcttacacctgtaatcccaggactttgggaggccaaggcaggccaatcacctgaagtcagaagttcgagaccagcctgaccaacatagtgaaaccctgtctttactaaaaatacaaaaagtagccagatgtggtggtgggtgtctgtaatcccagctactcgggaggctgaggcaggagaattgcctgaatccgggaagtggaggttgcagtgtgccgagattgcaccactgcactccagcctgggtgacagagcaaaactccatcttaaaaaaaagaaagaaagaaagaaagaaaaagaaatcaacatgcagtagtcagtgagcaccaaccatgcaattgtgctaggtacaagagatggaaaaaatattcctgaggtgggagaaacatgttaacagataaattacagaagacagacttgacacatgggagtaaaagtcattagaaacagaaggcctaattatttctagaaaaggtagtatttgagatgggtctcaggagaaaagtaaatgttctttgctgggagaagaagatggagacacaacgaaaagaacccatgcaacagcagaggcagtaaataattattcagtgtggcagtgatgtggaagatagagacaagagccaagactagcagtttggtttggaagcagatgagagtctttgtaaaacaagttaaggggtttggattttcctttttgtagacaacatggtgccaagagatgtcattaggcaggcaagcaatgagagcagctttaggctttgaggataatgcctctggcagcaaggtggaaggttaacagcagtagggagaaactggtggcagaaaattaagaggtgtttatgactcagtgaggtcctcaggtcaggagtgattaaacagcccatgtcagtgattgaagcatggttttgaggagagcctggtgactgatggacatgagggtgagagagacatgcatcaggacagccagcagtaatgttcctggcctagtaggttgtgtgcatggtaatcaccttccagaaaggatggagattactttcatttttacaagtacttggcaggatgagggaattgtactgtgatcaggatgacaaaagattacagcttcagataagttgtaggtgaaaatatagagctggagttgccagtttataggttagaggggaggtcagaaaagcaccaggatgcacagggcattcagcaggaacagaactcactcccatgtatgggactgcaaaggttgctgcagagaacaggcattgggtacctggccactgataccaatgggatgcttacagtctctccactgatttaagaattttaggctgggcacgatggctcatgcctgtaatcccagcactttgggaggctgaggtgggaggatcacaaggtctggagatcgagaccctcctggctaacgtggtgaaaccccgtctctactaaaaatacaaaaaattagccgggcatgtggcaggtgccagtagtcccagctccttggtaggctgaggcaggagaatggcgtgaacccaggaggcggagcttgcagtgagccgagatcacaccactgcactccagcctgggtgacagagttggactctgtctcaaaaaaaaaaaaaaaaatttttaaaacaactattctcaagtgttgcccatgtctctgaggtaagtgggggcccacaccactttgggggcaactgtctcctttctgcaggcagccctttcttatctggaattcagtctcctcatcttcctgccttctcccttgcatatctcctgcttgtgtaatagggtggaaagtggagggcaggacaaagttcagaccagtggcactggttagctaaaagatcactcgtttcattctactagacagttctggtctgaggcctgggttctcagaacataaaattatcactgtctcctttattgcatccctgtattatccctatccctcttagccagggcagctggctgacatccaccctctcaagaggagatgtatggacagaagacctggctcagaaacactgctctatgaaaagggcagatagttatgtaagaattttgcaaaaacttgagaaattaaaataagggagactatgaatgcaaaaacattaactgtcaagcaagtaagagataattcaaagaattttttaaaaagatgtagtccacataacttaaatcatgaggaagactggcagatgacagcatcagagtggatttcctaaataactgaggaggtgactgggaaaactgagccacctaccaaaacagctttacagagccaatgcatctcaattgttgtagaagaagatgagttctagaactcttatttactctaaagttttcaaatacattgaacaccacttaatgttttcctcaatcccaagcttcttgtaaaactttgaccctgccaaccatggcatcttagaggcagataaaagcttacctactttctggaacttcagatttctaaatatagcacatgcaatacagggaatgcactcagtatgcttgtggatacaataaagtccactactatacctctcaagcaggctttgttgacttcagctctcctgacatttggggctgtcctatgcattgtaatatgtggagcagcatttctagtgtctgtacactaaatgccagtagcaccctttcccaaagcaagacactaaaaattttatcattctgtaaaggaaatccacagtggacacccacaaagcttcctgatctcaaaacatgccactttattccatatgtagattttgagtttctggaacagttattttatccttatgacaatcccatgaggtagaaaagctactgacaagatgcctgtcatattcatcaatggcagtgccaccaaaggctaaagtttcattttaaattcccttatactttcaaaatcaaccgaatttattttgaaaaaaatatggccttctttattaaaaataacaacacacatacacggaggtaaataagcagtatacatttaaagctacattgttttgagatcaagctgactctataaagcagctgtcccatggagctaagcggtagttaggaattgtggattctgagcttaatttattgtcagcccttgggtagatcataaagcagctataacaggagtcaatatacccacccaaccctaatagttttgctctgagtggaaatgtgaaatctttgctgaatgcttttgaaaaagcggagtgaaaataacttagtccaggaaggtacagcaaaataaataaggaatattttaaagtaattaaaccaccagaaatatctgatatataatcctaccccattgtctctgagaaaagggaaaaagagaaaaacacaaagcaagctatcaaaagcagatacagcttttaaaagttctatctaattaaccccactaagaaattttttggctacctggtgtatgccaggcactgtataatgtaggacagtggtttccaatctttttggcaccagggtctggttttgcagaagacaacttttccgcacatgtggcgggatggtttccttttgggatgattcaagcacattacacttactgtgcactttgttgctattatgattgcattgtaatatataatgaaataattaaacaactcaccataatgtagaatcagtgagagccctgggattattttgctgcaactaaatgttcccatctggaagtgatgaggggcagtgacagaccctaaggcatcagagtctcataaatagtttgcaacgtacatctctcacatgctcagttcacaatagtgtttgcactcctatgataatctaatgctgctgctgatctgttatgcaagtgatggggagtggctgtgaatactgatgaagcttcactcacccaccattcacctcctgctgtgcagcctggtttgtaacagaccacagactggtatcagtctgtgccctggtgttgaggaacactgatgtggggcaactacattgattgattgagtgagtgagtgggtgagtgcaatggcgcaatctcagctcactgcaacctccacctcctgggttcaagtaattcttctgcctcagtctcccaaaataggtgctattacaggcatgtgacactatgtttggttaattttgtatttttagtagagatggggtttcaccatgttggtcaggctggtctcaaactcatgatctcagtttattctcccgcctcagactcccaaagtgccaggattacagacctgagccactgtgttcttctgacaaccacatttattaccagccatttattaccaggacacctatgttgtgcagtgcctggcatacaccagttacttaataaacagctattgatctaatgcaggactaataaggtaaggtgtattttttttccttcaacatgctgtgcctgtttcagatgcaaataagacctcaggagtcggcctgaagagacttaaaataaaaaatgttcccccagatgggaacatttagttgtaggaaaatcaagcagtcacttggatggtgtaacaagttaggtatgaatgtattacctgtgccagcttagtgagatgcatgtttacatcacataacaaacacgtgtctgccatgctcagggcttagagtctaaatttctgatgagaaataaagtggtatctagacaaccccagagagtgatattccatacatccataagcattagtagcatttctaaaaattatcaaacatccaacaagtcttttaaaaacaagatatgctaacatgcaagcagtttagcagtatttctaaaaatgataaacagtacaacttcattcacctgaaatggagcacaagacccttctgaaggaattcatatccattcctgcaaaagttctgtggactcttgaaggtagcacagaactaagtgttttttgtgtgtgtttccaaagaggttttagccgagcctttggcctctaacagactctctgattaaaatatggcttagaaactctacctgcctacttgaaaaagcatcaaaactagagaatgcttttcacaggtgtgaaaaaatgaaaacaaaatcacattcttctctttgcaattccctttcccccaccttccacttctattaaatatacttcagaataattgtgcacaggtacagagaccactacatatctaaaaaaggaaaaaaccctcaaatatatggggatgcactggcaatcttgcctttgcggaaatcattttgtttcctccagacagaagtgtctcactattttcagcattctcatctaacaggcagtttccactgactttgaaaggggtaagcttgaatctaaactcttaaacaagaacgagggttcaattttctagtaatgaaaatcccagacatgtttttcaacctaccaaatcgttatatttttaattcacccttctttctctctccacaaacactaacatcaccacccacaaaagaaaaaggcaatccctccaattttccccaaatgtgcgctgctgctagctgggaagctgtgtagagttttgtaatggagtgtgaactgctgcccgggatctgggctcatgttctatctcctaaccagtaagaagagaaggaggacaaatccactgagcaggaaaaaaaaaaaaaaaaaaaaaagaaaaaaaaagaaagaaaatctttcctcctcatttataacctctcatggatgcagcgctgacgagggtcgccaggtgcccagggcgcctgccaagcggcccactggccagcgcgtttctgcgccgggccgggtccccgagctctgcagttctccgccctgcctggaaaggaagcggccccgccaggtagtgggatcggccgccgcgtcccgtcctcacccttggccccgagggggtgacatcctcgatgtgccctcggcccagaaaacgcgccgcttcccatggagggcgtcggcgacaggaaggacctcccctgctccttaacaaacgttagggtcgcagtttcctaagagacgcgactgggattgggggagggggtccaggcagagactagtgctgggggcagaggaagcgacactaggctgcaggctggtgtggaaggaaaaaaggaagccctggaaatagccacagatttttccagcgggagtaggccccccccgcatttttcctggactcaacgatggcacccggcaccgagccccccactcgcgcgaagaaggtgcactccacactgacggatccctgtaaaacacacgccccgccatcggaaggaccaggaaagataggcgcccccatggcaaggccctggcccccttctttcctgggcgccttaggtggtagtcggccacaccaaaaccgccagccaggaaagggccagggctcagggcttcctgctgccccttgactccagtgtcctctgcccaggaatttcaaatccgcagagcagggcgcggcaggcgcttccaccaaacaccccggctagagcaccccaggaggccgcctcctggccagcatccctgatgctttgcggctgctggggaaagcaggaaccctagtttccaggcttccccgccagagagggactggaaaggccatagaaggaaagttcctcattccataggggaaggatgccaggagagagagggcagaaggtggggagcagcgtcgggaagatgtttctggcttaggaggcttataccatccaagtcccggcggtgctataataaataaattcaccccagtattccgggaggccaaggcaggagaagcactcgtgtccagaagtttcagaccagcctgggcaacgtggtgagacctccgtcactaaaaaagacatttagtcaggtgtgggccacggctgcaattccagctactcgggaggctgaggtgagaggatctcttgacactatagtgagtcataagcttgtgccactgcactccagcctgggtgatggagcaagaccctttctcatagaataaataaatatataaataaactcggccgcctgggttgggccgtattcctaccctccaaaacctaatatagatgcatgtcaggtctttctagcacagcgctgcagagactgccactacgcgtgctgggtgctgcttgacatggccagtggctcagtaagaggaggagtaggagtgaaggagtggagaaagaggaggaggaaaagagaaggaagagaggaaaaagtagagagaaaaagggaggaggaaacaagaagaagaggagaggaggagaaaatgagaagacagtaagaatagaggaagaggagaaaataaacaggagaggaggacaaggagactagtagcaatgaggataaaatgaaagttgggaggaggagaaataggaggagcaggagaggaggaggagaaaaagagaaggagaagatgagaagggaggaggaggagaggaggaggaagaaaaggagaggaatagacgaggacaggagaaggaggaggaggagaaggagtagagaagaaggatgagaggagaggaggaggagaagacaaggaagagcagatgaggataagagtaggaggagaggaggagaggaggaggaggagaagagaggaggagacgaggatgagaggaggagggggaggagagggggaagagtaaaaagaagaggagaggaggagaggagaaagagaaggcaaggaggtggaggagaggaagaggagatggagagaaggagtagaaggaaagcaggaggaggaaaaagagaggaggagagaaggaggaggaggagaggaggaggagagaaggaagatgaagggaagaaaaggagaggaggaagaagagagaggagaaaaggaggaggaagaagagagaggagaaaatgaggaggaagagaggaggaagtgggggagaaagaggagacaatgatgaggaggagaggagggggaggagaaagagaaaaggaggagatggaaaagaaagagaaaaggaggaagaggagaaaaaaattatcactttgaggcattcagtaattatgactattgtaatcgcttttggaataaagtttaaacttaataggagagatgggaacaaagatcaaagatccagattatttcagagctcaatttcagagctaaaaaaaaaaaaaacgatatgtggtaatacacctgtggacgttgccaatacaaaagagttgcagtattttggttttggatctagccatgtgtcaccatacacaatgtatgcagtgcctaggagagagcagagagccacaacacttaggtgctgggcccagtgaaacatcacaatctctttttggtcagagcccaaacaatagaggagagccacatcacctagtttctaggttcagcaatacatcacgataccttctgagaggaagaccaaagcaggagtgccacatcacctaggtgagagccccagagatacggcacaatgccttctgtgggtagggctcaggaagaagaggaaagttacataacctaggggctacagccagctatatgtcacaatcacccgaaggggcagggacaatgcatgagaggagagtcacatcaagtaggtggtgagcaaagcaatatgtaacaatcagaagagagtgtcatcttctacatgctgggccatgagatatgtcacaacatcccctatgggcaaagcccaggtaagagaagagatacacatcaaatagttgatgggctaagagatacttcacaatgccccctgtagaaagagatgaggagaaataaatcagattgcctgtgtgctgagcccagggataagtcactatttcatctgcggacatggcccaggcaggcgaggagagttacatcacttagatgctgggaacagagatatgcaacaatctcttctataagcaagaccctggtaagaaaataaagatacatcaaatatttatggacccacagatgccccctttttgacagagtcaaggcaagaaagtcacatcaactttgtcctgggcccagcaatatgtcaaaataccttctgaagacagggccaaggcaaatgagtaacaccttggagctgggcccaggatatatgtaacaatctcccctgtgggcagaacttaggaagaagagaagtgtcacattagctaggtgctgagcccagggatatgtcaccatccctccaggcaagagatgagaatacattacctgggtgaggagtgcagggagatatcacaatcccctttttaggctgggcccaggcagaagagtcacattgcctaagtgttagaatgagcgatgtgtcacaatgccccttctgtgcagcaccaaggtaggagagaaaacttacatcacctgagtgcaagtcccagcgttatgtcacaatgcttcctgtaagaggcaccaaggcttgagaatagactcatctcacctaggtgctgggtccagcaatatatcaccattctatttgtgaaccaagccaaggcaggagagtcaaatcaggtgtttggcagaggcgtatgtcacaatcacaccttcaaaaaatccacggatgagattatcaatccctcacatgttctggttctaggtatgagagtcaacatgtcttgtatgttgtgtgaagtacatgagtcataatctcaactgtgaactggatctgtgcagcagcttctcaatgttttctgggcattgtgtccccttagataagtcgcagcctgacacgtgtgctaaattatggtttgagggtcaacaaatccatgcataacaaaaatccatgtatgagagtcaacattgcaacttttgactgcctctagatataagattcaaaacctcaacagtgggccatgctcatgtgagaggacaacaatctttacgcttgactgtgtctgcttactagtgttacaatctcacctttgagctgggctctgttagtacactctctgtaccacccaaagaatttatgagatacatggtttggctctatgtcctcacccaaatctcacctacaattgtaatctccacgtgtcaaggcaggaaggtaattggatcatgggacagtttctcccatactgttttcgtgatagtgagtgagttctcaggagatctgatggttttataactgttggaagttcctcctttattcactttctccctcctgccacctcgtgaagaaggtccctgcttccccttctgccatgattataaatttcctgaggtctccccagctatgtggaactgtgagtcaattaaatcccttttctacctaaattacctggtcttgggcagttctttatagcagtgtgaaaatgaactaatacaatatgatatgcatgagaattgcaatctgcattaagaccttcatgctgatatgagcccatgattgtacgtgtcactctaagctcagatatgagagtcaacacctccccagttggctgtgcctaaatagaagagtactcatttgcctatgagctgggtttagaaatgggtcactatcacatatgtgtccagatgttcacatatgactgacacaattccatctgtagactgtgtctatgtgtgagattcaggatctcaccagtgggttgtgtccatgtgtgaggatgactattttaaggattggcagggtgtgcataccagaaacatagtatctcttgtgtccgtggacctgtgatgacactctctgtaccacttgagggctttatgcaatatgcaagagcgtggtgaacctctgtgacccttgtacaaagaggacacccaggatcttaccttttatcctgtgcctagctataagagacagtatctctctcattggctagttcaaggtatgagagtcatcatcacatctgtgagctgggccaagatatatgtcacagtcactcttctggattgggagtaagcaggagagtaacattacctgggtttggggccagatgtatgtcacaatcttctgtgagggctcagcaatatgtcacaatgatctacgtattcaagactcagtcaaaaagactcacaaccttgtcgcggggtccagtgatgtgtcataatcttttctgttaggagggtgcaggcagaaaagaagagtcacatttcctaggtagtgtatgcagatatatgtcacaaggcccactgggcagggcccaggcaggagcctcttattttctaggtgttggatccagtgttatttcacaatacaccaaatatgtggggcctgggagaaaggagagtcacatcacataggtgctgggccaaaagatatgttataataaccctctttagcagagcccaggcagaaaaataaatgtgtcacatcacccaggtgataaacaaaaaggtatggcataatacccctatgggcagggctcatgcagaagagttgcaccacatagttgttaagataggccatacgtcacaatacacaatttatgctgagctcaggcaggagaaaagagtaacattacctatgtgctaggctcagcgatacatcacaatacctccttggtcagagcccaagaagtagaagagagttacctcacctaggtgctgagtccatcaatatgtcacagtactcattgagtgaagggcccaagaatgaggattgcatcatttcggtgaggggcccagagctatgtacccatactccctgtaggtagggcttaagaaaaaaggagagagtcacataacctgtcacataacctagacagatgagcccagccctatgtcaaaattacaacagtggtcagagtccagacatgagaggagaatcacaacacttaaatgttgggtgaaggaacatgtcacaatcccaactggggacagaagcagaaaaataaggagaattacaccatctaggtaatgggcccagagatacattgcagtgacccctgtgggcaatgaccaggcagtagaatcacatcacctgtgtgatgggcctggggataattcactctaccttctgtgagcatagcactggcaaacgaggagagtcacaacacctaggtgctggaatcagagacacgtcacaatctcttctaatggcaaagtccaagtaagcgagaagagtcacatcaaatagttcatgaacttagagatatgtcacaatgccccctgtgggcagggtccaggcaagagactcacatcatctaggtgctgagcccagcaatatgtcacaaagctttctgaggtcaggagcaaggcaaaaatgtaacatcaccttactattgggtccagagacacatcacaacctttcctgcaggcagaacctaaaaagaatagaaaagtcacatcaactcaatgctgggcccagtgataggtcacaatattccccgtgagcagatatcaggcagaagtgagtcacatcacctggctaattggtgcagagatgtcacaatgcttcctgtaggcagggccaagtcaagagagtaacatcacctgggtaattggtgcagagatgtcacaatgcttcctgtaggcagggccaagtcaagagagttacatcacctgggttctggacccagcaatatatgacaatgggccatgtgggaagagtataggcaggagaatcacataacttgggtgtggagcccaatgtcacaatgccttctgtgcagggtgacaaaacagaagggtagactcacattaactgaatataaagcctagtgatagtgatatgtcacaatgctgtctgtgggaagtgccaaggcagtggactagagtcccatcgtgaaggtgctgggtttagcaatatgtcaaaattccatctgtgggttgggccaaggcagaagtgtcaaatcacttagttgctggacagaggcataagtcacacagtctcacacgcagaaagatacaggtacaaagttaaaattcttgcatatgacctaattctaagtatgggaatcaatatctcctttattttgggcctaagtcatgagtcttaatggtggactaggtctgtgcgtgggagcctcgctttcttctgtgcactatgcctccttagtagagtcacagcctcacaggtgtgctgaatcctggtctgagagtcaccagcccatctgtggactggatccccatataagagtcactttttcaagtttcaactgcatctaaatgtgacactcagaacctcaaaagttggccatgttcatgtggcagtatgacaatctttattgtcaactggatgtgcatacaagtgtcaaaatatcacctgtgctgtgccttgtcaggaaacactttgtagcccctgagggctttatgcatgagagtctcaatatgctctgagacctccctgctggtctcaaagttctggtatggacccatggttataatttttaccctaatctcttgtctcagattcaccttctcttcagttggctcagtccaaatagaagtgtcctcacctacctatgaactaggtttagaaatgagtcaccatcccaactgtagcatatgacagaaacaattccagctgtggactgtatcaacctgtgtgattcaggacctcacctgtgggctctgtcgacgtgtaagagtgaaaatcctaatggatgttagggtgagaatataagaaacacaatctcatttgaatgctgggctctgtggtagcattttgttccttgctagggctttatacaatgtgtaagaaagtagtgattttctataaccttcatacaaagaggagacatgggatcttacccatttctctaatcccagctaaaacagatagtatcttttctgttggctggtgtgtggtaatagagtcatcattgcaactgttagctggaccaagatatatgtccctacctgtgggtagggagcaaacaggagagtcacatcacctatgttttgggccaggaatatgtcacaatcttccctgacagaagtgaccaggcagaagaataatatcacctgggtacttagccaggaatatgttacaatcacaatcccctcctgaaagctgggtgcaggatgcaggctgcagaaccacatcaccttggtaattgggctcagcgatgtgtcaaaatgctttctgtgggcaaagcccaattaggagagactcatcatctgtttgctgaggccagcaatatgtcacaattttccctgtaggcagggtgcaggcagaagaagagagccacatcgcttaggtgatgaatgcagaaatatgtcaccaggtcttctgtggacaggccccagccaggagccttccattttctaggtattgggcccagcaatatgtcacaatacccaaaacatgtggggaccagaagaaaaaaaaaaaaaaaaaaagagacatcacctagatgatggatcaagtgatatgtcacaatcttcttatttggcaggtctcaggcaataaaaatgtgtgtcatatctcctaggtgatgaaaaaacagtatcttataatacccctgtcttcacggctcatggggaagagtcacatcacctacttgttgggtgcagccatatattacaatatgcaatgtatgccgggcccaggcaggagaggaaagtaacatcccctaagtcctgtgcccagggatacatcacaatgcctccttgagcagagcccaagaagtagacaagagtcacattacttaggtgccaggtacaacaatttgccacaatacttcctgagagaaaggcctaggcagaggtctcacaacactttggtgagggaacaagaaatatgtaacaatgtccctggtaagtagagctagaaaaaaagataagcatcacagaacatagggccagtgcccacttatctgtcacaatcacaccagtgggcagggctcaggcaagagtagagagtaatataatgtaggtgctacagcaagcaatatttcacaattttcagtgtgggcaggtcccagaaagaaaatgagtatcacatcacctaggtcatgggcccagagatatgtcgcagtggcccttgtaggcaataatcagccagaagaatggcattgcatgtgtgctgggcctagtgataattcattattccttctgggggcctggcacaggcaaaagcagagagtcacaacacctagctatttggcccagagatatgtcactatttcttctatgggcaaagtccaggtaaaataacagtcacatcaaataattgatgcaaccagagatttgttataatgccttctgttggcagggcccatgcaagagagtcacatcacctaggtgttggacccagccatatgtcacaatacacgacgtattcagggctcaggcaagagatgatagtcacaccatttagatcttgaatccattgaaacattacaattttatattgagcaaaagctaagcagtctagaagagtcacatagcctaggctttaagtccagcaataccttgcaataacccctgagaggagggcccaggtaaaagggtaactttatttaggtgagaggcctagaaataagtcacaattatctgtgtgggtaaagatcagaacgaagagggaagttacataaagtaatagatgtgctgatatgtatgtcacaatcactctaatgggaagagctaaaacatgagaggagagtcacaccacaaaggtgctgcatattttgcaatacagaatgtatgcagagcccagaaaggagaggacagtcacatcacctaggtgctgtgcccagcaatacattacaatctcttcttggacacaacccaagcagtagaggtaatccttgctgctggacccaaaaatatggcacaatataccctgaaaaaagggcccaggtagcagtgtcacatcacctggggagggtttcagaaatatgtcaaaatgcctcctgtgggtaaggctcaggaagaaaagaagagaaaaataacctaggggctggggccagccatatgttaaaacaacctcagtgagcagggcccaggcatgagaggagggtcacataacatagatgatgtgccaagtgatatgccacaactcatactgtggacaggtctctgcaataaaggagagtcacataatctggctgacggtcacagagatacatcacaatgtatttatctcttgtccttacggacaggaatcaggcagaagaatcacatctcctctgggctgtgtcctgggataatttactctcccttctgtgatctgagcccagggagaaaaggagactcacattacctaggtgttggggccagaggtatgtcacaatgtcacctgttggcaaatatgaagtaagagaggggagtaacatcaaatagatgatgggtccagaaatatgtcacaattccccttgtaggcagaatctgggcaggagatacacatcacctgggttttagtcctagaaatacataactagatgcaatgtgggcaatgccaaggcagaagaataaaaaacacataccctaggtgttaggtgcagaaatatgtcacaatttcatgtgacattcctggacctaacacctagggtatatgtctttatggtgacatcctcactcaggtgcttggaagaagtgtatgtcacaatcagagctgcaggtaagttcaaggataagattaaaactcccacacatatccttcttctgggtatgagagcaaacacctgctgtatgttgggtctgagtacaaaattcacagtatcaacaatggactgaatctgtgcatgagaacttccgtcccttctgtgcactgtgtcttatttgtggaataatagctttacaggtgagttgaatcttagtctgatattcaccaacccacctgtgaattacttcgaagtatgagactcaattatctgacttttaacttcctcctaatgtgagattcagaacctaagcagtaagctgaattcatgtgcaataatgaaaatctttactatgagctttgtgtgcataagagtgtcacaatctcacctgggccagagatacattacaatctcctcctgaaagcaggaaatgggcagcaaagtcgcctcacctggatgccgagcccagcagtaaatcacagcattctctggactcagcttttggttcaggaacatgaaagagaggcacatcacctggtttctgggtgcagtgatgtgtcacaatctgttgccctcagagaagaagatgaacagaaaaggagtcacatcagctaggtgctgggttagtcacaggtcacaatcacccctgtaagcaggaaccaggccgaagtgagtcccaaaaatgtcccctgtgggcagcgccaaggcaggataataaagccacatcacctaggtgctgggtcgagcgataactcacaatcctgtatttgggctgggccccggctacaaagtcaaatcactcagttgctggccagagggatatatcacatttacacctgttggaatgtcagagaatgatatctacaatccagcacatatcctgtttctgagtatgtgagttaacacctcatgtatgttgggtcttagtacatgagttcatctcaacaataaactggatcagtgcataagaggcacaatccttccagtgcactgttttatctgagtgagttacagcctcaaaggtgtgccgaatattggtcttagagtcatcaacctacctgtggacaagattcacctatgagaatcaattttccaacatttgactgcttttggttgtgaaatccagagccttaacaatgggctgtgttcatgtgggaagatgacaatctttttctgtcgacttggtgagtgtcacaatcttgcctgtgtattgccctagggctttatacttgatgtatgagattctcaatctgctctgagacatttgtgctggtatgaatcatgatcattcctatggccttaagcccaagtatgagaatcaacatctctccagttagctgagtccagaatgaagaatcttcaccttcctatgagctgagcttaaaatgagacaccatcccaactgtgcttacatgtttatatatgatagctgcaatctcaaatgtagactgtgtccacctgtaagattcaggatctcaataatgagctttgttcaattgagaaaataatgagaaatacaacctcacctttgtcttgggctctgtgttgacactctctgtaccacccaggggctttctattaaatgtgagacagtagtaattctctatgaccttcatacaaaaatgagacctagggtttgaccaattttcctaagcctagctaagagagacagtatctttcatattggctggctcaagttatgagagtcattatgacacctgtaaactgaatgaagacatatgtgacaatcccacaattgggtaaggagggaatgaacaggagaatcacatcacctgggtgctgtgccagagatatttacaaccttctctgagagcagtggccaggcaagagagtcacatcatgttgttgctgggctggaattatgtcataatttgttctgagagtaaggaccaggcaagagaggcacagtacctgtgtttttagccagcgatatgttatcccctcctgaaagcaggactaaggcagcagagtcccttcacctggttgctgggcctaatgatatgtcacaatgtcttctgtgtctaggtccaatcagcaaatgcacatttcctactgctggctccagtgatgcttcacaattctttttattgggatggcccaagcagaagaggaaatctgaaacacctaggggatgaacaaaaagtcacttcccaataactctgtgggcaggacacatgcaggagagtcacatcacctagcttctgggttcagtgatatgtcacaatcccttctgtgggctgggcccaaacaaagagagtcaaatcacttgggtgctgggaagaggcacatttcacacctgcaagaaggtccaagaatgagattaaaaattccacacatgtccaaattctaggtatgagagtcaatgcttcctgtatgttgcttctatatacatgagccacaatctctacaatggactgaatccacttatgagagcctcaattttttctgtgtactgtgttcccttattagaatcacagtctcacaggtatgctagatttttgtctgagagaaaccaatcaatctgtggacaagatccacttatgagagtcaattttccaacttttgactgtctccaggtatgagattcagaagctcaacagtgggctgtgaaaggatgatcatctttactgtttgctgtgtgtgtgtaagagtgtcacaatcttacatttgtttagggccatgttaagacatgttctgtatcacccaagggctttatatggtatgcatgggagtcacaacttcctctaaatcctttgtgctgttatggacccatgatagtgtctgtagctttaagcccaggtgtgacagtcaacatctttctaattggttgtgtccagataggagagttttcacctgccagagctgggtttagaaatgagtcaccatcacaactccgaacagaaattcacaaataaatgtcacaattttaactgcagactgcatccatgtgtgagattaagtgcctcaccagtgggctttgtccatgtgtgagggtgacaatcataatggttgtcagggtgagcacacaagaaacacaatctcatctgcatgctggaccttgtgatgacactctctctaccacccaaggactttatacaatatgtgagagagtggtaaccttttataacctttgtacagaaaggaaacccaggatcttacccatttttctacacctagctatgacagacagtatttgtccccttggctggttcaaaatattagtcattatcacacctgtgcactggccaatacatatgtcaaaatactacctgtgtgtagggagcaaacagaagagtcacatcacctaagtgctgagccagggatatgtgccaatcttttctgaaagaaggggccaggcaagagagatgtatcacctgggttctcagccagggatatgttacaattccccactgaaagcagggcacagacaacagcaacacatcacttggattcagggctcagtgttatgtcacactgtgacctttgggtaatacccaggcgtgaaagacacaacacctggtttctgggttccacgatatgtagcaatctttcctacaaacaacatgaaagcagaggaggagagtcaaatcccttaggtggtgagtgcagtatgtcataaggcctctggtgggcatagctcaggcaggagtctctcatccagtataagttgggatcagtattaagtcacaatattcaacatatgcagggcccaggcaaaacagaagagttacattacctaggtgctcaatccagtgatatgttacaataaccttatttttttcttttctttcttcttcttcttttttttttttttttttttttggcagggcccaggcagaagagaagagtcatatcatctaggtgatgaataaaaaggtaagtcattattcctctgtgggcagtgcttgtgcagaaaatttcaccttgtaggtataggactcagcaatatatcacaatgtctgcagcgctttggaaggagaggagagtcacatcacttaggtgctaggcccagcaatacatctcaatcacttctttggcaaagctcaagcagtaaaaaagagtcacatcacataagttctgggtataacaatatgtcaaaatacccccgagaagagggcccaggaaagagagtcactttggtgagaatatcagagatatgggacaattccgtttttgggtattcacaaaaaaagaacgtcccataacctagaagctgggctcagctctatgacacaatcaccctagtaggcaggtccattaaagagaagactgccacatcacataagtactgggcagtgatatgtcataatccccatgctgatagacccagagacatctcacaataacctctttaggcagagatcaggcagaagaattacatcatttgtgtgttgcacctagtgataagccattactctcatttctgtggacatggcccaggcagaagcgcagagtcacattacctaggtgctgggccaagagatatgtcacaatcttttacataagcaaaaccaaggtaaaagggaagagtaacatcagatagtaggtgttaccagagacatgtcacaatgccccctgtatgagagaatcaagcagtaaaaacacatcactacattgcttaatctagtgacatgttaaaatctttcctgtgggcatgatgcaggcagaagatgagagtcatatctcctatgtgattgatgcagagatatgtcacaaggtctcctgtggacagggtcgagactgaagccttccatccactagggtttgggtccagtgatatgttacaatacccaaattatgcagggcccaggcaaaaaaagagagtcacatcacctaggtactgggtccaatgatatatcacaattttctattttggcagggcccaggcagaaagaaaagttacattaccaaggtaatgaataaaaatacatgtcataatagttttgtggacatgatccatgcaagagagtcacatcacctaggtgttggacccagaaatatgtcacaatatacaatgtatactgtatgcctctcagggctgaggcaagagatgatagtaacttcacttatttgttgagcccagctatacaatcattttttgggcaaagcccaagtagtagaggagagtcacatcacttcggtgctgggtccagcaagttgtcacaatacctgctgaggggagggtacaggcaagagagccatgtcacttaggtgaggggcccagagatatctcacaatacccctgtaggtagaactcaggaaaaagaagagagtcacataatctaaaagctgggcctcgctgtatgttacaatcagccagtggacaggtcccaagcatgagagtagagtcacatcacataggtgctgggccaagcaatttgccacaaccttcactgtggacaggtcccaggaaaaagaagagtcacatcatttaggtaacaaaacctgagttatgtcacagttacttgtttgggcagaggtcagaaagaagtatcacacaacctgtgtgctggactaagcaacacgtcactctctcttttttaggcatggcccagggaggagagaagattcatatcacctaagatctggattcatggataggtcccaatttcttttttgggcaatgatcaggtaagagagcagagtcacatcaagtggttgatgggcctggagatatatgacattgccccctatggacagggaccaggcaggagactcacatcaccttggtggtaggacgagcaatatatcacaacacgttttgagagcagagccaaaagaggaacaccatcttggtgttgactgcagcaatatcttacacttttttgtgtgtgggcagaacctataaagaagggaaaggttggccaggcaccgtggctcatgcctataattctaacacttagggaggccgaggtggacagatcacctgaggtcaagagtttaagaccagcctggccaacatggggaaaacctgtctctactaaaaatacaaaaattagctgggtgtcctggtgggtgcatgtaatcccagctactcgggaggctgaggaaggagaatcacctgaacctgtgaggcagaggctgcagtgacctgagattgcaccactgcactctagcctgggttacagtgtgagactccatctcaaaaggaaaaaaaaaaaagaaaaagaaaaatcacataagctaggcgctgggcccagttatatgttatagtcacccctttgagaagggaacactcaagagaagagactcacatcacctctgtggtggacacagagatacttcaccatgctctctgtaggcagggccagaacacaagagttacataactgcggtgttagaccaagcaacatgtcacaatggctgatatgggccagacacagtcaggagagtcacataacctgggtgtgggactcagttatatgtcaaaatgcccactgggcagcgacaaagcaggagaggagattcacatcacctggatgtaaggcccagtgatgttacaattcccctgttagcagtgataaagcatcacctaggggctgagtccagtgatgtgtcacaattccatctgggctgggtcaggcagatgtgtcaaaaaggttctgtgaaggtgcatatgtcacagtcacaccttcaggaaggtccagtaatgaaattaacaatctcacacatgtcccggttctaggtatgagagtcaacacctgtgtgttggatccaaatagatgagtcacaatctcaacaattgacttgaaccatgtgtgagatcctagtttctagttgcattactattagtaccagtacctattaattcttccacattctacatctttgttctgtatgaatgtgcatacaaatatcgatacatatacaaggttatatgagtatttctatgtaaatacgtacacaaaaattgtacctcaaaaaacatttttcaatcttttagcatattctaagggtgcagatatagaattatttcccttctctagctcagtagcatgtcagaatgggacatagctatacaatgttatttgtatagacaaacaaaacttcactttcgggcaagttctgaaaaataagctgatagtaaaaccatgtaacactttctgtccaggttagcatttctggaccttgtttttcttctcagagtatgcatgagctattctcatccactactggtggcccgtcttgattaaatctatagttgctatttagagaactggctgactgaatccacctgggctcatctgagtgactgactgaaatcacctggcctgaaattattggtcaattaaaatcatctgggctcaaatagttgctgactggagctaaattgaaatcacctggacttaactaattgcctgattttaatctcctgggatcagctaattgactgtaattacctggtttgagttaattggctgattgaaatcaaaagtgctgacctaattggctgattaaaatcacctggaatgaggtaattgactgactgaatttacctgatctgagcaaattggctgattagaatgacctagaccaagctaattggctaattgggataaactgggctaagctgattggctgatagaaatcatcagggctgagtaaatgggctgattgtattcacctgccctgagaataagtagggaaatgacctctgactttgaagttttttttacaagacatactcataaatggacattacatagacatatttatatatctgtatgtgtttgcatatgcttatctatctacatatacctgttaataaatattcaagttaaagtgtgcaaagaaatctgaaatttgctttcaatattgcagtctatcttgaatttacagaccttggcttttctacccatattcaataagtcacttcttcagccaaccaaaccaattacagaattgtgttccaatgtcacaagttcaaaaacaaagagctcctgaaaagatgtaagctttaaatggaattagcattttcaatttttgtttgggcctttaatttaaagctagtttatctctgttcctgtgttaatcagaatgaaaagaaatatttttgacttggcattgaataacacttgtggttttattaaatttcttgcttacagattggagcaacaaaaatttttttcttttttttttttttttttttttttttacagagtttcactctgttgctcaggcatgagtgcagtggcaggatctcggctcactgcaacctctgacatctgggttcaagtgattcttttgcctcagtctactgagtagctgggattacaggtgcccaccaacatgcccagctaatttttgtatttttagtagagatggggttttaccatgttgaccaggctggtctcaaactcctgacctcaaatgattcacttgtcttggcctcccaaagtgtgttgtgagccaccatacccagccaaaaaatactttctttaaacatgttaaatgcagctaaattcacatcagagtattcttccatttgtgtactcttgtggatatactttagcgaacaaataagattttacatgtatggaaatttatttttatataactatcagtaaaaatacctatcaatgctttgaaattctatatctttattctgtataaatattgaaataatgatagatagacctggatagaaatacactgtcatgctcagggtcaggttacatccccagctgagagccaaggggagtgggtggatgtggggcagggagctggaggaacacttgagagacagcaggtaaatgagacatggctttattcagcagccccttcacagggtcagtgttacatttatacactacacaaacaatagtggctgagtgccaggtggtgagcttctctatgttatgtctacatgaatatgctttattcagcagccctttcacagggtcagtgttacatttatacactacacaaacaatagtggctgagtgccaggtggtgagcttatctatgttatgtctacatggctgtggttatacaaagctgtgcacctgtgccacaaacctgctgagtcatccagactgtttacctcagcctatgtctgctgccctatgcctgcttggttgcagcaaagccattttctttacatatacatgagtagataaataaacatatacgtacaagattatataagtttatctatgtaaataattgtatatgcaaaaaatgttcatcaggagacattgtcaattccccagcctatcttagaaacacagatgaagactttacttctcacctatatagctccataccatctcagactgagagacagccatacatatatacatcaacaaagcttcacacttcagggcatggcctggatataagcttccagtactgccacatgaagctttatgtgcatcttaacatttcagggccctactttctttctgtttgtatttctgtgttattcacatgtgccatctttgttctcccttgatgcctctgcttcctaatttaactagttgtctgattatatccacctgagctgtgctaagggaactagtgaatgaagatatgctagtgaatgaagatgacttctgatctagattttttctgaagtgttttactagacatatgcacaaatggacattacatagccatacccatggggtccacactgtgtttatatatatgtacatttcccccacctacttgatatgaaggtatatgtgtgcagaaaaataacacaaagtaagcatggtcagaggttatattaatttttttcaggccatttgaatgcaatcagccaattagttcagtgatgatttattcaattcaagctacacaccagctgatattttaaaaataaatgtgaaaatgtgttttgttatctggaacacggaggtttttctttctgggtctcgttaagttagcccaaagtggctctgtacattcaggtagaaacatctagaaatgctcaacaccagtcacctagctttcctcaaaaagaagcttttgccgagccagtaagaattacctttgtcatttcagtgaatgttcactctatcctggttaaaatgtggccaggtactatgtaccattatatttgctttcagtttcacaatctatcttctaaaaagtaacctaaactttctctctcttaccacaaaaaccctatttcagcctcagagatgataagataagagtgtacttttacatcgtgcacgcattgggaaaataataaacagcccctgtcttgactgaggccataatgagaaataataagtatactcaaattaaggtgaggacctttggactggggctggttcatctctgtccctatgtacaagataaaggaaaaggtcaaactgaaaatgggaatgaatgacattttcatctctcagaagtgagcaacaaagaccaatgttttctttgtaaatgataaatatagcagaatgtttgcaaggctgtatctttatttgtgtactcttgtagatatactttatagggcaaagagtttatacttgtatgtaagtttcttcttctgctactgttagtatcaatacctatcaatactttcactttctataaatttattctatatcaatatagatacaaagattaatatatctgtatacagatatacataggcagatataaaaacactcacagaattatatgtctatgtaattatttatatttacaaaaaattgctgggcacggtggccaacgcttgtaatcccagcactttgggaggcaaatgcgggcagatcacgaggtcaggaattcaagaccagcctggccaacatagtgaaaaaaaatacaaaaaaattagctgggcgcagtgacgagcacctgtaatcccagctacttgagaggctgaggcagaagagttgcttgaacctgggattcagaggttgcagtgagccgagatcacaccactgcactccagcctggttgacagagtaagacttcgtctcagaaagaaaaaaaaatgtactccaaaagacattttcaatcccatagcatattataagaatgcatatgtagaattacttctcttctctttggctcagtagcatgccagaatggaacatagctatacaatgtttttgtataaacataagcaatgcttcacctttagggaaaagaaccgggaagtaagctgacaggaaacccatgtaatactttctgtccacattagcacttaagaacacttattttcttcttgttttatgcatgcatcattcacatctaccttcctgggcttgcctggatgaatacttagtcatcacttacataattggctgattgaatccacatgaactaaacaaataggctaattgaaatcatgtgagctgagctaattggctggctggaatcaccttggctgagctagtttactggttggaaatacatgggctgagccaatttgctgattgcattcacctttcctgagggggctgtgtaggaccgatttacttatattttgggactggtttactcatatgtgattcagctttattatattttgggacctttttttataagatgaactcatagatagatatcacatagacatatttatatgacccagtgtgtttgaatatatttatctacatatcttatatctgtatataaatctacagaaaaaagcattaaaagaaagttgtaatatgattccagtatcacagtctatctttggcttttcaactcctacctaaaatcatgtctctagccaacaaaaccaaaagacaagatggtattcccttttcgcttaaaacaacaacaacaacaacaacaacaaatagtgcccctgaaatactggaagctttaaaaagaattattcagcattttcaatttgagtgaggatctttaagctgaggctagataatctctggctttgtgctcaccagaattaaaagggtcatctttggcttggcaataaatgactcccatatcatataaagcccctgagtgttacagatagtgttatcacagggaacaatatgcaggtgagattgtgtttctcatatgcacaccccaccaaacattagaattgccaccctcactcatggaaagagctcactgttgaggtccagaatttcacatgcaaatacagtccacagttggaattttgactgtaatatgtaaagacctagccacagttggattagtgacatatttctaagcccagataagaggcaggtgaggactccagtatctggacccagccaatttaagagatgttgactctcatacctgggcttggggcagcaggtatggtcatgggtccatacaagcatgaaggactcagagttaattgtgattgccattcatattgtataaagtcctttggtattatagacagtgtagaaatagaaaagaacaacaacagataaaacaatagcaagtcactccaagtattgtgggaacaaacgaaattcaggttagaaaaaaaaaacaggaagaaggtctgagtagtgccaggtactcaggaggccgagatgggaagagcacctgggagagaccagggaggtcaaggccacagtgaatcatgattgcatccttctcctggacctgaacggtactgctgccagtgagatttatctggttgaccttagacatggcaaggcgagacccatctggttgaccttagacatggcaagctggcagctaagtccaatgctttcagccaacatctgtctcaaattaaaaagccaacagtaaatatataacaataacaaagatataataattaaaaaccaatacataaataagtgggagtgaacaatagtaaaaggtaattaatatcacaattaaggtctctctctctttctctctctgtttgtcacacccaggcttgagtgtgaaaaaatataaaccaaaatgtcaacttcagcatgcaggaaggagcataggagaatagagagaaaaaagaacaaagaagaaaaataacagcaagtcatcctaagtattgtagaaacaaactgaaattgtagttagagaaaaaaaaagaaagagagaaaagtaaggttctatctgtcgcacggactcgagaggccgagatgggaagaccaccaggcaagacaggggagattgatgccacaatgaatcacgatcgcatttctcttctgagcctgaactgtactgctgctggtgagagccatctggtcgaccttagacatggaaaggcgagagccatctggttgaacgtagacatgacaagctggcggctaagtccaacgcttgtagccgacatctgtcccaaaataaataaatttttaaaatgagtaaatatataacagtaacaaataaataataacgaacaatattaaagaccagtacataaataagtgggagtgaacaatggtaaaaggtaattaatatcacaattaagatctccttcctctctccatttgtcacacccaggctggagagtgacaaaaaataaaccaaaaagtcaacttcagtgtgcaggaaggagcataggagaatagagaaagaaaagaacaaagaagaaaatcaacggcaagtaactctaagttttgagaaaacaacctaaaattagggttaggaaaaaaaaaaaaaagcagaggaagaaggaccctgtcatcccagctacgtgggaggctgagatgggaagacaacctgtgcgagaccaaggagatagaggccgaagtgaatgatgatcgcgtccttctgctggatctgaatagtactgccgccagcgatagccatctggtagacctaagatatgggcagacgagagccatctggacgactttagacatggcaaggcgagagcgatctggtcgatcttcgacataggaaggtgagagctattttgttgattttagacatgagaaggtgagagccatctggtagaccttagacatggcaaactagcagataagcccaacgcttctggccgatatccatcttaaaataaatttaaaaaccaacagtaaatatataacaataacgaagaataaaaacaatattaaagaccaatacataaaaaagtgaaagtgaacaatggtgaaaggtaattaatgtcaaaattaagatctcctcactctgtctctctttctctctctctccctccttgtttctctctctcttggtttgtcacaccaaggctggattgtgacaaaaataaatcaaaaggtcactgtgcaggaaggaacataaagaaacagagaaagaaaataacaaagaagaaaaacaacagcaagtcactctaaatattgtggaaacaaactgaaattgaggttagaaaaacaacacaggaaggtccaagtagtcccaggtacttgggaagccggagatgggaagaccacctgagggagactggggagattgaggatccagtgaatcacgattgcatccctctcctggacataaatggtactgccactagtgagatccgtctggtcaaccttaggcgtgggaaggcgagagccatctgatcgaccttagacctggcaagctggcggctaattccaatgcttgcagccaacttgtgtctcaaaataaatttttaaaaccaccagtaaatatagaacaataacaaataataacaatattaaagaccaatacataaataagcgggcgtgaacaataatgaaagataatatcacaattaagatctctctctctcctccgtttgtcacactcaggctggagtgtgaccaaaaataaatgaaaacgtcaacgtcagcatgcaagaaggagcataggagaagagagagagaaaagaacaacgaagaaaaacaaaagcaaatcacgctaaatattgtggaaacaaactgaaattggggttagaaaaacaacacaggaagaaagttcatgtattctcaggtacttgggtggcccaattggaaagatcacccaggtgcgaccagggagattgaggccgcagtgaatcacaatcacatctttctgctggacctgaatgatactgccgccagccagagccatctggacggccttagacgtgggaaggcgagaaccatccgttcgacttcagacatagcaaggcgatagccatctggtcgaccttagacatgggaaggtgagagccatctggtcgaccttagatattggaaggtgagagccatctggttgaccttaggcatggcaagctgtggactcattccaatgcttctggctgagatgggaagatcacctggatgagactgggaagatcgaggctgcagtgaatcacaatcccatctctctgttggacttgaacagcactgccgccggtgcgagccatctggtcgaccttagacatgaaaaagcaagagccatttgtcatgtctccacctcagacattacaaggtgagagccatcttgtcaaccttagacatggcaaggcgaaagccctctggtcgacctcagccatggcaagaggagagccatctagtcgacttcagacatggcaaggcaagagccatgtggtcaacctcagacatgaaaaggcaagagccatctggtcgacctgagacatgacaaggtgaaagccatctggtcgatctcagatatggaaaagtgagagccatctggtcgaccttagacataccgaagcaaatgccctgtggtagactgtagacatggcaaagcgagaactgtctgggcaatttcagacatggccaggctagagccttcttgtggaccacagacatggcaagaggagaactgtctggtcgacctgagacatgaaaagatgaaagccatctggtcgaactcagacatggcagagtggcatctggttgacctcagacacagcaaagcaagagtgatcttgtcgacctcaaacatggcatggtgagagccatcttggccaccttagacacggcaaggtgagagccatcatgtcaacctcaaacatgggaacacaaaagccatttggctgaccttagacatggcaaggcaagagccatctggtcgacctaagacagggcagggcgagggccatctggcccacctcagaaatggcaaggtgagagccatctggacatgtgacatggcaaggcaagaactatctcgttgacctcagacatggcaaggcaagagccatcaggaagccctcaaacatggcaaggtgaaagccatctcatcgtccttagggatggcatggtgagagctatcttgtccactcacacatggcaaggtgagagccatcttgttgacctcacacgtggcaaggtgagagccatctggttgaccttagacatggcaaggcgaaagtcatctggtccaccttagacagggaagggtgagaaccatcttgtccacctagacatggcaaggcaagagccatctggtcgacttcaatcatggaagctgagggccatctggtcaaccccaaaaataggaaggcaagtccagctagtcaatcttagaaattgcaaggtgagagttatctggtggaacttagacatggcaagctggtggctatttcagtgcttgaggctgacatctgtatcaaaataaatttaaaaatcaactatatatataatatcaaacaatattaaaacccaaataaggtgggagtgaacaataataaaaggtaattaatatcacaattaagaactcctctctctgtgtgtgtctttctctctctctctttttgtttgtgacaccaaacggaagggtgaagtgtgacaaaaaataaaacatgacatgggaaggtgagcaccatctaatctaccttacatatggcaaagtgagagccatgtggtggacctcagatatggcaaggtgagagccatctggccgaacttagtcatggcaagctggtggctaaatccaaggcttgtggctgacaactgtatcaaaaaaaaaaaccaaaagtaagtatatcacaatatcaaacaaataacaacaatcttaaagatgaaataattaagctgaagttaacaataataaaaggtatttaataccacaattgagaactcctatctctctctctctcactgtgtgtgtgtgtgtgtctgtttgtcacaaccagtgtgaactgtgacaaaaaataaaccaaaggtcaacttcagtgtgtaggaaggagcatacaagaatagagagagaaaagaacaatgaaaaattacagcaagttactctaagtatcgtggaaacaaactgaaattgtggttagaaaaaatacagaggaataagttcccagtagtcccaggtacttgtgaggccgagatgggaagacccttgtttaaaagactgttgtataaaactaacctgtctcatgacgttctaaaccaagctcaggttccctgctattgggtgaaccatccaacgcttggtgaattctgtttcacaataggaagatccaacaccaaaggatcaaaaagcgatgtcgctatgaactcttggccactgcaaggcagttatcccttgtccacctcagacatggcaaagcaagagccgtctggtcgacttcaatcatagcagctgagggccatctggtcaaccatctggtatcttctctgacacgtcttgcttaaaacccaaccaaaacgtcaaaaggatcatgaggccctgctttcccggtctgtattcatactgaaaatcaagatcaagcaacttctgcccttctgctccacaggaggttttggtactccctgcactcaccttcagacacctgcattactgtttgacaggtgtaccgcaccagtccgactctgcacttggcactattccaggaccagttaacatccagccagcatgtggccaggtgcttggcgccaaaagtgagccccttttggctttcctccccagccccaacttcaccaggtcagtgaaaaaatgatcagggtagtggaatttcaccggcagcccacaaggccagtggacctcaccccatctcctcagagaaacagaggggtgctggggcctttcacttattctacacctctcatgtctcttcaccataccagactagagtcagtctcaacagagtctttgttccctgctgattctgtcaagcccattcctttggctgtggtttcactggatagcaggtaggaacagtgggaatcttgtccatccattcatatgagtcactaattagatgatgaggcatttggctacacttaagagagacatatttactcctgccatttactcgtgcttcattgaatttcttcattttgacattcagagcactgggtagaattcacgttgtgtcaacacccaccataggccttcaccatgctttgttttaaaaagtcagattcccctggtctgcatcagttctaagaaggctgctaggaagtggcaatagcaaggtgggcagggatagggaagaggaaggtatggcaaggtgggtggaggatgtctgcagaggggtgccgctagcgttgaggggtggagtacagcacctcatccagccactgcctgcacccagccccatttcaagccccagccagactggcaaagcccttagagcaaattcttaccctgaacttactgatccagcttgctgatttcccttacctacattgttctaacatgccagaggctgtttaccttggagacctgctgtggatatggttacagcctggtgtgagatttacaccctctcccccagattttcaagggcctgtgagagctcaccaggtgcctcctgatctatgattctttccaaggcacagacctctctctaagggtgaatccactacagggtgccctgctcttcacaaaaagaactctcccctgggctcccaccagcttctccaggatcacttccattacctccctgaatgcctcatggtgcccatctctgccactccggattcagaaatctgaacttgactccgtttccattggctgagggcaatggaagtcatcatccatcccttcggaatggcactctcctatctctggggaccgagtgacccatcttcaactggaacccttctccacttcggccttcaaagttctcatttgaatatttgctactaccaccaagatctgcacctgggacagctccacccaggctcatgcccaaggcttcaaggctcattgcagcggtcctcccactcatagcagcatagcatcctcggggctccagcgggagcgaccaccctcaccactcccatccactctcaactgctggcaatggccgggtatgggcccaatgtttcagtaccatccatttttcagggcgagttgattctttgttgttaaacactccttagtggattctgacttccatgcccaccgtcctgctgtctatatcaaccaacacattttctggggtctaatgggcatcagcatcaggcaccctaacatggcatttggttcatcccacagcagcagttctgcttaccaaaagttgcccgctaggcactcgcatttcatacctggccccatgccatcgagctgggcttctaacccatttaaagtttgagaattggttgagatcattttgactccaagacccctaatcattcgctttaccaaataactgcgtggcatggggtttttgcgagagcgcccgttatccttaggaaaacttcagagggaaccagctactagatggttggattagtcttttgcccctatacccagatcagatgaccgatttgcacgtcaggaccactacagacccccaccagagtttcctctcgcttcgccctgcccaggcatagtttatcatcttttggtgcctaacacaagcgctcattctccacctgcccagcacagtgggcgagagtggacggtggtgctcccttggcaaactggagaggcctcaggatcccgcctcagccagccagcgcatcagccttcaccttcattgcgccacagtggctttcgtgcgagcccctgactcgcacacgtgttagaccctttggaccatgtttcaagatgggtcatgtgggtagccaacagcgccaccggcctcgtgcacttcttccactgttcttttgaaatgagtgcatggccgaagagtccccccagacccgacagcacaaccagcctggggcacaccacagtcagcccctgcccctcacatgcggcctactcgctgggggcagggaaggggtggtagagtagttacaccgtgggaggggtggcccagccccctagagggacgctgtcatgcccccacgggggatcccctcatggggggctcccactggggtgggagcagggaaggggagagcagggcaacaggtctcactacctcagtcccgggattctgcgagtgctactgctgagggactgtaacactcggggtgtggcccagctcacccccctccagagggatggggaggacatgaccccccgagccaccttccctgccgggcctttccagccgtcccagagccagtcacggcgcagcaccacagtggaaatgcatctggcggtggccagtcgccgtctggaggacagtccccaaggactcccccgcctgcccaacccacccacctccgcacctgctggggcccgccacctccaaggaggaggaggggtggccgaggagggagggcggttggaggggtcgggaggaacgggaggcaggaaagatccgccagaccactggcacagcccgacccgccgcctgtttgaatcttccatcagactgcatggatcccacacatttaagtcttaacggtttcacgccctcttgaactgcgtcttcaaagttcttttcaactttcccttacagtacttgttgactattgtctcttgagccagtatttaaccttagatagagtttgccaccagcttgaggttgcattcccaagcaacccgactctggaaagacccaggcgtggcagccaggggctgctaatggcctcacaccgtccacaggctggctgggcctcaatcagaaggacttgggcccccacaagtggcgttggggagtgagtcttccatacgccacatttcccgcaccctaccaaggggcagggatttggcactgggatcactgttcacctaactttactaagggcatcctggttagttccattttctccgctgactaatatgcttaaattcagcaggttgccacctctagcctgaggtcgcgtcttggaataaaggaagagacgggcgggcatggaggatgcgagcctggacactcggttgggagacaggcccagtgagggaggggggcgggggtgacagagaagagctgcggctgacggcgtccctgccgcaccagagccggatgacgggagggagaagcaagaactaggggcagggaatacacagtaccctcaccgtccagaggactgcgactgaggatgtgcttccacccccccccaatgcggaagctcaagggggccacacgggcggcacagccatgaaccagaggcaagcacacaatggcggatgctgccatggtgtcccatgagtcaccaccagggcaccgccagcacgcagcttggccttgaccccgaccgggggggtcacgcagggcagacttctggccccagaagtgcacagcaggctgggtgggagaggaggagggtgcagggaggagcagcatttggccggacaccaggctgccaccggggcgggcggtaaactgtggtgggcggtgaactgtggcgaccgggatgaaatcttgctttccacccccccaaccttccccaccccccacccgccaatgtaggacagcacaggacattttgcccaggcccaggcgaaccctggaccgcttgcagcacgagggagctctctaggggaacccggactgtggcagccacaggaactcggccccagccggctcttttccttcctctcacaggcagtgggatccctcctaaccaaggctccttcccccaccacgtggtccctcacagggtttgcatggatgaatgggaggtgggaggaaggtgctaatggaaaaggaggggggcaccacaaggcctgtacttgggaggacagaggggccaacgagccctgcaagggaaccgccagccatgcacccctgggaggccagaagcaccccttgggatgattgctcagcaagtgatgactcagacaggtgtagccctgggaggaacacggagtcacaagtgcatttgaaatgatgatcagtgtgtcctgcaactcacattaattctcacagctggctgcattcttcatcaatgcaggagtggagtgatccaccgctaagagtttcacaaagttctttggtgagggactcccaacaccgggaggccctcctggcacagcacatccccgaagggattgcctcaggtcagccaatgagacagcactgagacagaactctcagaggggttggaaggtttcaccacaggggcatgcacaccacccccacaggggtgagcacagacacccaacagttgccagggggttcccacccctgacaacgcagagcccaacatgggcagcacacacaatggcacgatggccaccaggtaagcccccactcagcagctgcaaccatggcaatgacaggagaaaaacaaacaactccattaaaaagtgagcaaaaaacatagacacttcttaaaagaaggcatgcatgtgctcaacaagcatacgaataaaagctcaacatcactgatcattagagaaatgaaaaaaacacaatgagataccatctcataccagtcagaatggatataattaaagggtgaaaaaataaattctggtgaggttgtggagaaaagggaagacttataccctgttggtgggagtgtaaattagttcagccattgtgaaaagcagttaggtgatttttcaaggagctaaaagcagaactaccatttgatagctctgctagccatcccattactgcatatatatccagagaaatgtaaattattttaccatagagacccatgcattcaaatgttcattccagcactatacaatagcaagatatggtcaacctaaatgccatcaatgacagactggataaagaaaatgttgtatatatacaccatttcctctcataatagtgatttgatccaaataaggagtcaaagtccatgaatgagtatgtggaatgaaaagccactctacaagatcttgctcttgaacaataacaccagtaggtgaatgctgagttggaaaaattagcaaatctagagtcttctctggatctattctatttatttgagccttatggacttgctttttgattagctgtaactcgacctcagcctcctttgttaattgctgagggcaagtgagactaggacctcctctaaggatggaaaatagattactcatggcataggtaggaatgtctagagcaagtcgtatccaattaatgtccctagtaatttttgaaagtcattaaatgttttcagttgatccctatgtatggttactttctgtggcacaatggtagtgtcatttactaaggtccccaagtaagagtaaagattagtagtctgaattttgtcaggagctataattaaaccagcatgagaaattgaattttgcaagtaatcataacattggaataatatttcttgagtgggggcaccacaaaatatatcatccatctgatgaataatgtaacactgaaagttttttaccagtaggttcaattgcttgccctacataagtctggcaaattgttgaactgtttaacatgccttgtggcaacactttccagtgaaaatgcctagcaggctgcaggttgtttacaacaggaatcatgaatgcaaaccattcacagtcttgctcagctaaggggatagaaaagaaagtcttttaaatctatgattattaaaggccaatttttccaaatcatagcaggagaaggcaatcctggctgcaattcccccataggttgtataactgaattaatggctcttaagtcaattaacattctccatttacctgattttttcttaattacgaaaactggagaattccaaggggaaaatgttggagctgtgtgtcctttttctaattgttcagtaattaagtcttctaaagtctccagtttctctttactcagcggccattgttctatccaaattggcttatctgttaaccattttaaaggcataggttttggaggcttaacaatggccaccatcaaaaatgatatcctaaaccttggagggaacttttcttcctgcttgaagcagttccttcaaaccttgcaaaattcttctagtcccacaccagggacataccctatttcatgcatcatatgctgactttgagggctatataattgttctggaattagaacttgtgctccccattgttgtaataaatctctcccccacaaatttataggtacagaagttataattggttgaatagtcccagattgtccatcgggcccttcactatgtaaaatatagctactttgatatacctcaagggctttaccaagtccaactatgttaaattgagtgggttgaattggccatgtggacggccagtgctttagagaaatgattgaaatgtcttctcctgtatctgccaaacctttacacttctttccctgaatagttatttcacaggtaggatgtttatcagtaatttgattcacccaataagctgctttgccttgtttatttgtgcttccaaatcctcctgttcatttaatttcacttttccccatttccacatatggcacaatcaggagctgtgttatgtgctctcctggctctgctttccagggaacagaagtagatataacaatttgaatttctccattgtaatctgaatcaatgactcctgtatgtatttgcactccttttaaattgaaactagacctacctagaagcaatcctatcctccccactgtcaagggtccacagactcctgttgggaacttttgcaagggttccccaggcagaaggctcacagcttttgtgcagcataaatctactgcagcactattggctgtggcaggggacagacaaaaattagttgggcacacacgtatagtcccagctactcgggaggctgaggcaggagaatggcatgaacccaggaggcggagcttgcagtgagtggagattgtgccactgcactccagcctgggtgacagagcgagactctgtctcaaaaaaaaaaaaaaaaaaaaaaaaaaacctaggaacaagtataagtaaaaattctttctgatgtgatctttatatgataaacctacacatgtacccttgaaccaaagataagagttaatatgaaataactccatggctggaggagaatgaaatgtaggtggaaagaccggtttgtgctacagatagtgacccaaatgggactgtactctgatttacttctgtgtccatgtaggcagatgagattatgaacaagttacctagaaacctaatctggtggagaagatgggttgctgctgcagatccagtgcttggaggtggggatatgccgggacaattgtagacacttttgtgtagtgtatagtgttttctgttaagaaacgctagaattaaaaacgctgtggtgaagtttctgagggtggtgcctagtcctgagagaggtgtgggcacatcaatgtgtagtgggtatgtttgtgagtgggtgagaatcctgtggtggcagctgtgggaaaagggggtctgtcatcagagcacgtttaagtttttagtcctctcttactctgggagaagacttgaaatcacaggacaatgggcagtgtgactgcctgtgtactagagagtggagactttcattcccagacacccagttttattcccggccaggcctccatggtatctttttttctggcatcaaatttgtagtttgctgaatgccaagcacttctacaccaactcattgtctaacatttgaattctgataccacccagagtcagcacacaccctgattcagggctcagtcccacaacattgtccttagtgcagttgccagtcacaaaccccatgggcccagctatgcctctgagctactgtttaaaaattcaggacttcctagccaggcttggtggtgtgcacctgtaatcccagctattagggaggctgaggcaggagaatcgcttgaactcgggaggtagaagtttcagtgagccaagattgtgccactgcattgcagcctgggtgacagagcaagactgtcccaaaaaacaaacaaacaaacaaacaaacaaacaaaaactaaaaaaaaatcaggactcctataaacgatctaaagttcaataatttgatagagctacccacagaactcagcaaaacactgtagttatgttgaccagtttattataaaagatacaatccaggaaaagtcaaatgaaaaatatgtgcagggcaaagaaaagaggtggcaaaagatgaagcacatagaaaatcctggtaaatagctgtgattaataaaataaaattctccatctattatgtgctccaggaaccatttatgaaaagaaacatccttcccattatgacttagatgctctttttttcacctatcacatagtcagacatagactctgcacatttccttcttgttctcatttaaaaatcagctgaatttttcttcagtggtaaaaataaaatacttctaaataaaatttcacttaagtcaggctgggtgcagtggctaacgcctctaatccaggcactctgggaggctgaggcaggtggatcacctgaggtcaggagttcaagagcagcctggccaacatggcaaaccccatctctactgaaaatacaaaaattagctgggtgtggtggcacatgcctgtaatcccagctacctgagaggctgaggcaggagaattgcttgagcctgagagatggaggttgcagtgagccaagatcacatgaccgcactcctgcctgggtcacagagtgagactccctccccacaaaacaaacaaacaaacagacaaacaaaaaaacttcacttaagtctatcaccttcctacaggctcctgaactttgagctatcctctgcctaaaccaacatacaactccattttaggtctctcctaagaacgtacgacttgagggtaaaacattctctgaaccagaatctgactttttcactctccatttgccattcccctcccaccttctttctaatcttgtttgcttctccctataaaagaaagcacttttctgcctaaactttgcaatctttaaagctttaaggattatagttggtacttcctcctgttgcaatactcttttggaacttaatttttttttacataaatctaactttgttttattttacaaagtctggcaactgtctcaaaacaagaacaaacttatcttcagtaagaccctcccagtccccttctatcgtaaccttaacagcatctgcctatggctccccagctttccagggctctgtagcttctctcactataaagttttcttctatggctggggtgagcaggctgggacacctgcaggggaggctccccagaaaaaactaactgggcctataataaactcattttgcaggctcagtattagccttaacttggagtcactgtgatcaggcttaatttccacatcagttactttcctttttttgtttttgtttttttttgttgttgttgttgtttgtttgtttgttttttaagaaagagtttggctcttgttgcccaggctggagtgcaatgacacagtctcagctcactgcaacctccgcctcctgggttcaagcgattctcctcctgcagcacctcccaattagctggaatttcaggtgcctgccaccacacccagctaatttttgtatttttagtagagacaggatttcaccatgttggtcaggctggtctcaaactcctgacctcaggtaatccgcctgcctcggcctctcaaagtgttgggattattggcatgagccactgtgcccagccactcacttggattttgaaagtaagtgtttcaaaaatccagcaaaattactcaaacacaatgttcacgtaaaaaaaaggaaattttaaggtgcttgtatttcatacctcaacaaggaaagcaaaattatccattcccttcagacaataaatgtattattgtactattttcatgaaaaatcatgtagcaaacaattagtaatataaaaacacttctaggagttaccaagtatttgtttgtttgtttttggagatggagtcttgctctgtcacccaggttggagtgcagtggcacaaacccagctcactacaacctccacctcctcagttcaagcaattctcctgcctcagcctcccaagtagctggcactacagacacatgctgcaatgcccggctaatttttttgtattttagtagagatggggtttcaccatgttgcccaggctggtcttgaactcctgagctcgggcaatctgcccgtgtcagcctccacaggtgctaggatcacagttgtgagccaccgcgcctggcctgaagttttatctcacaaaatttagaataaaactcagaaataaaaatcacaggatacagaacaaaaatattcacatcatgaatttaccctgtaaaaagagaaactgatgttttaatgaatcgatgtgactcactagttatctaccacattttcttgtggaaacctatttatttcctgcagccaaaatagaaggaagatttcccttatttttacccttggtagctagtattctaatagctattccttggaattcttttggaaatcacttagccataaaaaatacacctgacaaaatttctaaactcaccctgggaaagaaaaaggtaaatgagaatttttaggccgggcaccatggctcatacctgcaatcccagcaatctggcaagttgaggcaaatggatcacctgaggtcaggagtttgggaccagcctggcccacatggcaaaaccccatctctaccaaaaattaaaaaattagccaggtgaggccaggtgccgtggctcacacctgtaatcccagcactttaggaggtgggggtgggcagatcacctgaggtcaggagttcaagaccagcctggccaacatggtgaaaccccatctctactaaaaatacgaaaattagctgggcatggtgatgggtacctgtaatcccagctactcagggggctgaaacaggagaatcgcttgatcctgggaggtagagattacagtgagccgagatcaccccactgcactccagcttgggtgacacagcgagacttcatctcaaaaaaaaaaaaaaaaaaaaaaaattaggccgggcgcggtggctcacgcctgtaattccagcacttcgggaagttgacggatggatcacctgaggtcaggagaccagcctggcccacatgtctaaaccctgtctccactaaaaaaacacacaaattagccggcgtggtggtagatgcctgtaatcccagctactccagaggccgaggcaggagaatcgcttgaactcgggaggcggagtttcccgtgagccagatcacgccccggcactccagcctgggaaacagagtaagactccatctctaaaaaagaaaaaaaaagggagaaagagaaagaaataggtaaatgagaattttttttttttttttttgagacggagtctcgctctgtcgcccaggctggagtgcagtggcgggatctcggctcactgcaagctccgcctcccgggttcacgccattctcctgcctcagcctcccaagtagctgggactacaggcgcccgccactacgcctggctaattttttgtatttttagtagagacggggtttcaccattttagccgggatggtctcgatctcctgacctcgtgatctgcccgcctcggcctcccaaagtgctgggattacaggcgtgagccaccgcgcccggccataaatgagaatttttaaccaaagaaatatactattagattcttttgaaactcacctgctttaggcccttgtaaatactttacgtttcaagctctactaataatatgcaatttatagttaaaaaactgatgttaatataagtgaacaaatcttttcaaggtgacaaacccagggagtggcagtgctggttagaaaacagatgtgtctcactcatgagtcaagtcaggccatccaatcacttgagagattctcccaccccaacttgctcactgaagtgctcaatgaccaccctctcaggagacactgcactatgccccagtgagttcccgaagtacgttttacttcgcaaattcttgcacaatctcactggggtcatgtttttattttttgtttttagggatactatttttttcacaaaacttaaagaatccagggtgcagaaattacgtctgttttcccctcaataccagcatcagattggctgaccagcaatgaatcttcaagaaatgcaagctgagttgagtgaagacaatcttttttttttttttttttttttttttttgagatggagttttccctcttgtcacccaggctggagtgcagtagcacaatctcagctcgctgcaacctcagcctcccaggttcaaggaattctctggcatcagcctcccaagtagctgggattacaaatgtgcaccaccacacccagctaatttttgtatttttagtagagacggggtttcaccacattgaccaggctggtctcaaactcctgacctcaggtgatccgcccacttcagcctcccaaagtgctgggattacaggcatgagcaactgcacccggcccgagtgaagacaatcttaagtgtctcagggggttagcttttcaaaggaagagtacaccaggagattcctttcagctccaagcattccgctgactgctcccttgagaggctacaccctgtatctcaggttgtcgtatgggagaaaatgactcaggagctggtattcactagacactctagcagacatagtcatggcaggtatattggtttattcacagacagtagtgaaacctggggtgcctgagaacacatcacccaataaagctcccccccaaaaaactttgacctcaaaacattcttataagatccccaaaacattcttataaggtccctgtgcctagggaagatgaaagaaaaagaggcacagagatttttcttttcttttttcttttattttattttatttttaattttattattattatactttaagttttagggtacatgtacacaacgtgcagatttgttacaaatgtatacctttgccatgttggtgtgctgcacccattaactcatcatttagcattaggtatatctcctaatgctatcccttccccctccccccaccccacaacagtccctggtgtgtgatgttccccttcctgtgtccatgtgttctcattgttcaattcccacctatgagtgagaacatgtggtgtttggttttttgtccttgtgatagtttgctgagaatgatggttttcagcttcatccatgtccctacaaaggacatgaactcatcattttttatggctgcatagtattccatggtgtatatgtgccacattttcttactccagtctatcattgttggacatttgggttggttccaagtctttgctattgtgaataatgccacaataaacatacgtgtgcatgtgtctttatagtagcatgatttataatcctttgggtgtatacccagtaatgggatggctgggtcaaatggtatttctagttctagatccctgaggaattgccacactgacttccacaatggttgaactagtttacagtcccaccaacagtgtaaaagtgttcctatttctccacatcctctccagcacctgttgtttcctgactttttaatgattgccattctaactggtgtgagatggtatctcactgtggttttgatttgcatttctctgatagccagtgatgatgagcattttttcatgtgtcttttggctggataaatgtcttcatttgagaagtgtctgttcatatgctttgcccactttgtgatggggttgtttgtttctttcctgtaaatttgtttgcgttcattgtagattctggatattagccctttgtcagatgagtagatcgcaaaaattttctcccattctgtaggttgcctgttcactctgatggtagtttcttttgctgtgcagaagctctttagtttaattagatcccatttgtcaattttggcttttgttgccattgcttttggtgttttagacatgaagtccttgcccatgcctatgtcctgaatggtattgcctttattttcttctagggtttttatggttttaggtctaacgtttaagtttttaatccatgttgaattgatttttgtataaggtgtaaggaagggatccagtttcagctttctacatatggctagccagttttcccagcaccatttattaaatagggaatcctttccccattgcttgtttttgacaggtttgtcaaagatcagatagttatggatatgcggcattatttctgagggctctgttctgttcaatcggtctgtatcctgttttggtactagtaccatgctgttttggttactgtagccttgtagtatagtttgaagtcaggtaacgtgattcctccagctgtgttcttttggcttaggattgacttggcaatgagggctcttttttggttccatatgaactttaaagtagttttttccaattctgtgaagaaagttattggtagcttgatgaggatggcattgagtctataaattacctttggcagtatggccattttcacaatattgattcttcctacccatgagcatggaatgttcttccatttctttgtatcctcttttatttcattgagcagtggtttgtagttctccttgaagaggtgcttcacatcccttgtaagttggattcctaggtattttattctctttgaagcaattatgaatgggagttcactcatgatttggctctctgtctgttattggtgtataagaatgcttgtgatttttgcatattgattttgtatcctgagactttgctgaagttgcttatcagcttaaggagattttgggctgagacaatggggttttctagatatacaatcatgtcatctgcaaacagagacaatttgacttcctcttttcctaattgaatactctttatttccttctcctgcctgattgccctggccagaacttccaacactatgttgaataggggtgttgagagagtgcatccctgtcttgtgccagttttcaaagggaatgcttccagtttttgcccgttcagtatgatattggctttgggtttgtcatagatagctctcattattttgagatatgtcccatcaatacctaatttattgagagtttttagcatgaagtgttgttgaattttgtcaaaggccttttctgcatctattgagataatcatgtggtttttgtctttggttctgtttatatgctggattatgtttattgattttcatatgttgaaccagccttgcatcccaaagatgaagcccacttgatcatggtggataagctttttgatgtgctgctgaatttggtttgccagcattttattgaggatttttgcatcaatgttcatgaaggatatgggtctaaaattctctttttttgttgcgtctctgccaggctttggtatcaggatggggctggcctcataaaatgagttagggaggattccctctttttctattgattggaatagtttcagaaggaatggtaccagctccttctcgaacctctggtagaattcggctgtggatccatctggtcctggactttttttggctggtaagctattgattattacctcaatttcagagcctgttattggtctattcagagattcaacttcttcctggtttagtcttgggaggatgtatgtgtcgaggaatttatccatttcttctagattttctagtttatttgtgtagaggtgtttatagtattctctgatggtagttagtatttctatgggattagtggatatcccctttaccactttttattgcgtctatttgattcttctctcttttcttctttattagtcttgctagtggtctatcagttttgttgatcttttcagaaaaccagctcctggattcactgattttttgaagggttttttgtgtctctatttccttcagttctgctctgatcttagttatttcttgctttctgctagcttttgaatgtgtttgctcttgcttctctagttcttttaattatgttgtgagggtgtcaattttagatctttcttgctttctcttgtgagcatttagtgctataaatttccctctacacactgctttgaaggtgtcccggagattctgatatgttgtgtctttgttctcattggtttcaaagaacatctttatttctgccttcatttcgttatttactgagtagtaattcaggagcagtttgttcagtttccatgtagttgagtggttttgagtaagtttcttactcctgagttctagtttgattgcacttggtctgagagacagtttgttataatttctgttcttttacatttgctgaagcgtgctttacttccaactatgtggtcaattttggaataggtgtgatgtggtgctgaaaagaatgtatattctgttgatttgtggtggagagttctgtagatgtctattaggtccacttggtgcagagctgagttcaattcctggatatccttgttaactttctgtctcattgatctgtctaatgttgacagtggggtgttaaaatctcccattattattgtgtgggagtctaagtctctttgtagatcactcaggacttgctttatgaatctgggtgctcctgtattgggtgcatagatatttagggcagttagctcttcttgttgaattgatccctttgccattatgtaatggccttctttgtctcttttgatctttgttggtttaaagtctgttttatcagagactaggattgcaacccctgcctttttttgttttccatttgcttggtagatcttcctccatccctttattttgagcctatgtgtgtctctgcacgtgagataggttttctgaatacagcacactgatgggtcttgactctttatccaatttgccagtctatgtcttttaattggagcatttagtccatttacatttagggttaatattgttgtgtgtgaatttgatcctgtcattatgatgttagctggttattttgctcattagttgatgtagtttcttcctagccttgatggtctttacaatttggcatgtttttgcagtggctggtaccagttttccctttccatgtttagtgcttccttcaggaacccttttagagcaggcctggtggcgacaaaatctctcagcatttgcttgtctgtaaagtgttttatttctccttcacttatgaagcttagtttggctggatatgaaattttgggttgaaaattcttttctttaagaatgttgaatattggccaccactctcttctggcttgtagagtttctgccgaaagatcagctgttagtctgatgggcttccctttgtgggtaacctgagctttctctctggctgcccttaaaattttttccttcatttcaactttctggaggagtatctttgtggcgttctctgtatttcctgaatttgaatgttggcctgccttgcttgattggggaagttctcctggataatatcctgcagagtgttttccaacttggttccattctccccgtcactttcaggtacaccaatcagatgtagatttggtcttttcacatagtcccatatttcttggaggctttgtttttttctttttattcttttgtctctaaacttctcttctcacttcatttcattcatttcatcttgcatcactgatatcctttcttccagttgattgcattggctactgaggcttctgcattcatcatgtagttctcatgccttggttttcagctccatcacatcctttaaggacttctctgcattggttattctagttagccatttgcctaattattttttcaaggtttttaacttctttgccattcgttcggacttccacctttagctcagagtagtttgatcgtctgaagccttcttctctcaactcatcaaagtcattctctgtccagcttcgttccattgctggtgaggagttgtgttccttttgaggaggagaggtgctctgatttttagagtttccagtttttctgctctgatttttccccatctttgtggttttgtctacctttggtctttgatgatggtgaggtacagatgggtttttggtgtggatgtcctttctgtttgttagttttccttctaacagtcaggaccctcagctgcaggtccattggagtttgctggaggtccactccagaccctgtttgcctgggtatcagcagcggtggctgcagagcagcggatattggtgaactgcaaatgctgctgcctgatcaatcctctggaagttttgtctcagaggagtatcggctgtgtgaggtgtcaatccgcccctactggggggtgcctcccagtaggctactcgggggtcagggacccacttgaggaggcagtctgcccgttctcagatctcaagctgcctgctgggagaaccactactgtcttcaaagctgtcagacagggacaattaagtctgcagaggttactgctgtcttttgtttgtctgtgccctgcccccagaggtggagcctacagaggcaggcaggcctccttgagctgtggtgggctccacccagtttgagcttcctggctgctttgtttacctactcacgcctcggcaatggcaggctcctctcccccagcctcgcagccaccttgcagtttgatctcagactgctgtgctagcaatgagtgagattccgtgggcgtaggaccctctgagccatgtgtgggatataatctcctggtgtgccgtttgttaagaccattggaaaagcacaatattagggtgggagtgacccgattttccaggtgccatctgtcatccctttctttgactaggaaagggaattccctgaccccttgcacttcccaggtgaggcgatgacttgccctgcttcagctcacgcacggtgcaccgcacccactgtcctgcacctactgtccggcactccccagtgagatgaacccggtacctcagttagaaatgcagaaatcacccgtcttctgtgtcactcacactgggagctgtagactggagctgttcctatttgaccatcttggctccgggacctttttttttttacaatacagtatcagggtattatgctttggtttattctcacaggagatatttacaaacagaaacaaatctctttaaatgtgctatacaatgctttgtcaaaaaaggattaattaaaatatggtatcaaaaatgtacactaaaggacaaatagttaataatgtgaattagggagaggaagttgacatttggaattttcagaagaagctgttaattgagtatattattgcaagccagagttaggctggaggaatggggagaaaggggtagacttgagaagctgcttgggacacctgtggaaaatgcaggaaaatatcagtcccctgtggagtctgaaaatatttaagtggcaggcaattccactgaggtagctctaatccttgaattcctacttttaaaaagtctaactgaaatcctttttttggtaaattactacctcaagggaaaaaaaaatttaggcttaaccaactgcaaactgtcaattaagctctgactacataaccaggaaatttttacactcaaggtaaaaagtaagaaactatgtaactgtaactaacagattattgagtttaagtttttgcatcatgcaccttaaaaaaagtctttctggctgggtgtggtggcttactcctgtaatcccagcaccttgggaggccaaggtgggtggatctcttgaggtcaggaaaaaaaaaatctttccttcacgctcctcccattgaccacaaactacaatatttgaacaacactttcatttaattatttaatatttttgcagtgactcccataaatttttctttttactctttgagacggagtcttgctctgtcactcaggctggagtgcagtggcacgatcttggctcactgaaaactttgcctcccaggttcaagccattctcctgcctcagcctccagagtagctgggattacaggtgcccacaaccacatctggctaatttttttatttttggtagagacgggcttttaccatgttggccagggtggtctcaaactcctggtctcaaatgatctgcctgctttggcctcccaaagtgctgggattacaggcataagccactgcgcctggcagacgccagtaatttttattttatttttttctgagtcggagccttgttctgtcacctaggctggagtgcagtggcaggatcttggtttgctgcaaccttcaccttctgggttaaagtgattctcctgcctcagtctcctgagtagctgggattacaggtgcctgcctccacaccctggtaatttttttgtatttttactagagatggtgtttcaccatgttagccaggctggtctggaacccctgacctcaagtgatccaccctgatcaccttggcctcctgaagtgctaggattacaggtgtgagccaccacgcccggctcccaaaatattattattttaatatgtaagcaatatttattaataaagtatatatacttagaactaaatttttgaaaccaaccctgtattttacctttttagcacattgcagttcaaagcaggaacatttcaggcacctagtagccacacatggccaatagctgccacattgaagtacagcttcaatgtcagtggaggtgaagggcttgaacatcccttttctgccacaggggaggtctctacctaccaacaacttcttcagttaaaaaggtgaaacagataatggccatagaaagggcagaaggtaggaagagtaaaataaccacaggtggaccactgctggccacctgttgtccacctttcttccagtgaacaaaaaattctcagccaaaggagaagaaaactctgtgttttcagatctgtccatagtcttgatgtccaatgtttagatatgtagaaaataggttaaggcaaacttattttgctatttggccttggccctaattgtcaggctgcggttatctgttttctcctatggtgtgggtgactatgtgagtataaggaccaattacatgcatacatgtctgcatgtattttttaattactcaacgtcattttgcaagacattcaactttaaattaggggaaaaaatcaatacttttagggtgcacactgttagaaggtaactaataaccaatctgtcattgaatcctggcatcctatctgcactgagtgcatgtattagttagctaccgcagcataacaaaccatccaaaactttttagctcataattgagacggtcagccatttaggctgggctcagtgggaccattcttttggtctcagctgagctccttcagacatgtatcatcagctgcttattgactaggcagctgtgcttctgaaggtgagcatctgcttctggggctatcaacaggggcaccttgcttctcttcctcatgttatcttatcctccatctggctaacatgggcgttactcatggagatggcacattctgaaagaaaaacaggagcatttgaaatcttttgagcctaagccccaaactagcccactgtcatagtcacagatttccattgccctgagcaaataaggccagccagatatatggtttggaaaccagattctgtacttcaatgggaagagctgtaaaagcattggcaaatgaatataaaagagataaaaagcaccaggtgcggtggccaggcctataatcccagtattttgggagactggggcagggggacagattacctgaggtcaggagttcgagagcagcctaaccaacatagagaaatcccgtctctactaaaaatacaaacttagctgggcatggtggtgcatgcctgtaatcccagctactcaggaagctcaggcaggagaatcacttgaaccttggaggcagaggttgcagtgagccaagattgcaccattgcactccagcctgggcaaaaagagcaagactccatctcaaaaaaataaaataaaataaaataaaaaattgcagccagacacggtggctcacacctgcaatcccagcactttgggaggccgaggtgggtggattactagaggttaggagttcaagatcagcctgaccaacatggtaaaaccccgtctctgctaaaaatgcaaaaattggctgggtgtggtggtagctgcctgtaatcccagctactcaggaggctgaggcaggagaatcacttgaacccagaaggtagaggttgcagtgagccaagatcatgcctctgcactccagcctgggcaacaagagtgaaactaagtctcaaaataaaaaattgctgcaatttttgaaatcactttcattctgccttttgcctatgtggtttatacaactatttcacctcaagaaacttgttcagccaggcgcaggggctcacgcctgtaatcccagcactttgggaggctgaggtgggcagatcacaaggtcagaagacccagaccagcctggccaatatagtgaaaccccgtctctactaaaaatacagcaaaattagccaggcatggtggcccatgcctgtaatcccagctactcgagaggctgaggcaggagaattgcctgaacccaggaggcagaggttgcagtaagctgagttcacgccactgcactccagcctggatgacagagcgagactctggatttaaaaataaaacaaaacaacaacaacaaaaaacagccgggtgtggtggctcatgaggtgggtgaatcatgaggtcaagagatcgagaccatccaggccaacatggtgaaatgccatctctactaaaaatacaaaaattagctgggcatggtggcatgtgcctgtagtcccagctactcaggaggctgaggcaggagaattgcttgaacctggaagacagatgttgcagtgacctgatatcacaccactgcactctggcccgagtgacagagcaagactctgtcaccaaaaaaaaaaaaaaaaaaaaattgaccgggcacagtggctcatgcctgtaatcctagcactttgggagaccaaggcaggcagaatgtcagagctcaggagttcaagacaaccttgggcaacacagggaaaccctgtccctactaaaatagaaaaaattagctgggcatggtggtgcatgcctgtagtctcagctactagggaggctgaggcaggagacttgcttgatcccaggagacggaggcttgaacccaggaggcagaggttcagtgagccgagatcacaccactgtactccagcctgggagacagagtgagactctgcctcaaaaaaaaaaaaaaaaaaatgcagaaacattttgaaaggacaaaataatttgggaaaataggtgagggatgagtttagaaaattaaaacccaaaaacacattattcattttaacgatagaaaaaatttgaggaaattttttttttttttaaataaagtctcactctgtagcccaggctgaagtgcagtggtgcaatcttggcccactgcaacctccacctcccgggttcaagcgattcttctgcctcagcctccagaatagctgggattacaggtgcacgccaccacgtcctgctaatttttgtatttttagtagagacagggtttcaccatattggccaggccagtcttgaactcctgacctcatcatccacccgcctcgtcctcacatagtgctgggattacaggcatgagccaccatgcccggcctggaaaaatttttaaataaaaaaaaaactttagagaaattaaattcaacagagtttaactgaacaaagagtgatttgcaaatagagtagcatgtgaatccagagtaggctcagagagatttcagcatagccacgtggtggacaaagacttatggacagacaaagcaaagtgacatacagaaaatggaagtgaggtacagaaacagccaaattcattacaacttgaggtttgccttatttgaacatggtttgaacagttgacatccttttattgaccaaaccacagtggttggtacaagaatgggtacagtctatttacatatccagttaggtttcagttcattgtgtaaaataaacgaacaaacaaacaaaaactattgactaaaattaaacgggaaaaggggcagctttagggtataattaatttaacaatttctccctagggtcatagaccaaaacttttttttttttttttttgagacagagttttgctctgtcaccaggctggagtgcagcggcgctatctcagctcactgcaacctccacctcacaggttcaagcaattctcctgcctcagacacccaagtagctgggactatacaggtgtgcccagctaatttttgtatttttagtagagatggggtttcaccgtgctgcccaggctggtctcaaactcctgacctcaagtgatctgcttccttcggcctcccaatgtagtgggattacaggcatgagccaccacacccggctgagatagaccaaaatttagacattgatatcactgtgtcatcataaaaaatgaacttatttagtctcagatctcactgtgaaatatcagaactgtgggttttataaagtggaaacaagaacttcaggttattattttattattattatttttaaaggattagactacaggggatctctttgtgttgaaatctgctatttatagaagaaaacaaaaacttgtttgtattttctcgtgtttttttgagatggagttcctcactcttgttgcccaggctggagtttagtggcgtgatctcctctcactgcaacctctgcctcccaggttaaagcaattctcctgcctcagcctcaggagtagctgggattagaggcatgtgtcaccatgcccaactaattctgtattttgttttttctttttttctttcttttttttttttttttgagacaaagtttcactcttgttgcccaggttggagtgcaatggcatgatctcggcccactgcaacctccacctcccaggttcaagtgattctcctgcctcagcctcccgagtagctgggattacaggcgctcgccaccacgcccagctaatttttgtattttcagtagagatggagtttctccaagttggtcaggctggtctcaaactcccaacctcaggtgatccacccacctcagcctcccaaagtgctgggattacaggcgtgagccactgcacccggccttaattctgtatttttagtagagacagggatttctccatgttggtcagactggtctcagactcctgacctcaggtgatccgctcgcctcggcctcccaaagaaaaactggtctgttttaagatctacctattttcttaaattttaggtttgataagctcacttttagcatgagtgactcattttgttttgttttggtctgtttgagatgagtgcacatgctcagtccacatgatggccataaataattttgtttaaaaaattcaccccaggccgggcgcagtggctcaggtctgtaatcacagcactttgggaggccgaggctggcagatcaaaagctcaggagatcaagaccagcctggccaatatggtgaaaccccgtctctagtaaaaatatgaaaattagccaggcatggtggcacgcacctgtagtcccagctactcgggaggctgaggcagaagactctcttgaacctgggaggcggaggttgcagtgagcccagatcatgccactgcactccagtctgggcaatgcagcgagactccatctcaaaaaaaaaaaagaaagaaaaaaaaatcaccccatttgtttaagttcttacataggtcatggtgtgaccaaaactcagggccttagtgccactctgtttccattattttttttattttttatttttttataggtggaatcttgctttgttgtccaggctggagtgcagtggcactatctcagctcactgctacctccgcctcccgggttcaagcaattctcctgcttcagccttccgagtagctgggactacaggcccgtgccaccatgcgtggctaattttttgtatttttagtacagacaggttctcgccgtgttacccaggatggtctccatctcctgacctcatgatccacccaccttggcctcccaaagtgctgggattacaggcctgagccaccgcgccaggccaatttttgtattttcagtagagatggggtttcactatgttggccaggcttgtctcaaactcctgacctcatgatccacccacctcagtttcccaaagtgctgaggttacaggcgttagccaccgcgcctggcctattttgggtttttgtccttatcatgtcattcataggttatggtgtcttcatagtcacatacgtctttgagtttctgtcattctgttttacaagagaccatttgacattctagaaatgactgcatgcaaacatttataacttttgagagaatacagtgaagtagggagatattactattttaactatcaggaagatgataccaagagttcgaaacatgctttttagccagggtccccatgaacaaccaactaaaattaaataggtcaaatagttagctagataagtggtctactcatttcaaccaagcacactgttcattaatcctctacaactgcatctctgtggatgcagagtaggctcagggagcctaatggatgtatttctccaggtgcaactatcagtgttagcaagttcacaggtacttctctgttcatccaataagtaattaaaagaaataatattatttagcacaacttcagcaagtacatttaaaatctattgtgtaatcatagcctttacagtataatcttctatagggccctattaggggggatgcatttctaaccattgcctcatttactctacgccatggaaagaaagacctaacaaatgatggccattcagaaaagtaagggcatcctggcaatgctgcttaacttattgtgaaaaagttgtccttaacttatgaagtaagttaagagcagtggaccaatattctgtttctgatattgtgagggaacaaatatcccttaaaaatttctcacccacactggcccttcatcttttatctatcaaggtgtaagttttttcacacataatgttggctacaaaattctctacatttgagtataccccataagtgcacacaagagacccctttctttatttctattgtttgtagagccataaaaaactgtgaaataagtgtgtcatgatagcagagaagtatgatcttgttctgagtgagtgtgtctcaccatgaaacaagcaaaaaaaatactgctgttattttgagacagtgagttagcattttgtccaaatatgtactatgtaattttttattgatatgtaacatgcatagagaaatacatgcacaaattcttcattcaagtaaagctcagtgaattatgaagaatacacttgtgtaatcagataataaaactaggctggacgcagtggctcatgtctgtaattcagtacattgggaagccaatgcgggaggattgcttgagctcaggagttcaagaccagcctacccaacatggcaaggctctgtctctattttgaaaaaataccaaaaaaaaaaaaaaaaaagatccaggcaggctggttgcatgcctgttgtcccagctactggggaggctgaggtgggaggatcacttaagactaaaagtttgaagctgcagtaacccagcattcagccactggactccagcttgggtgacagagtgagacctgtatgtgtaaacacacacacacacacacacacacacacacacacacgtgcacatggtgggggatgtgaaaaagagaaagtgtggctcctgcaattcagtgagacctggttctccatcttgggaactgcccatccacactgaaaccacaacctagcacatgccaattagcacactaaacctgctgagataccaccgtttacccttaaaaaaaattgaagtatttcacctaaaagaagggaaaaagaaaatgatttcacatctaaagcctttgtttcctttataaaacaactgccccttgtcattcgagttgtccagaggtgtctgacaacactaacacacttatggaatcagccaggaaaaatgggcctctcaggtgacaaacaggcacaatggtaactaaaggcaatccattctcatctctacatgatgcccccaactcatgaagtggtgttaactgtgtgaaccatactcatcagaggaaagtatgttcagggcaacacaatcatgaggctgcaaatcaaactgggggcgggaagcacgtaggaggtttccatggccaagacactggtggctatccttgggtgtcatttaaaaatttcaggtgaaaaatccttttcttccagttggctcaggaaaactaacagacattactattggaattcattttactttttagaatttctaagacataaatcatgcttcaaacactccaaaagacattcagctatacctgaggctgaggacctgcctcctcctccatgttagggccctgacagcaggcaaagagaaggagcacaggggccgggtgtggtggctcatggctgtaatctcagcactttgggaggctgaagcaggcatatcacctgaggtcaggagtttgagacgagcctggtcaacaaggcgaaaccccttctctactaaaaacacaaaaattagccatgtgtggtggtgagcacctgtaatcccagctacttgggaggctgaggcaggagaatcatttgaacccaggaagtagaagttgcagtgagctgaaatcgtgccattgcactccagccagggcaacaagaatgaaactgccatctgaaaaacaaaacaaaacaaacaacaacaacaatagcaacaacaaaaacagagaaggagcacaggcaggtggggacagagaacagcccgggtctatagggatccccaaccacccccagagccggtgtctgtaggagggactgtgtggcaagaatcaggtagggagctgggcttcatggagaggttaccaccacttctgcacctttaacttttatgattccactgtggttctccccaggtctcccacccatcctaccctcactccctcattgtgtgttaggcaggtctggttaaaatggggagaataatacattcagattgtagccttcaaggtattcccatctggggtacagggagtagagaggcaagtcaaagtctatggtggtgcttacttctgggcctgagggcaggaaggccagggctgggcacatggatatctggggaaacaccactgctaattccttctccccacccggagctacaatgaggccaggacaatcacaattaataaaaccactgcagctcacatcctgcataaaactaaagtgtatcccaacccccagtcctaccacagatcttcaacttcctatcccagaacacaggaagccctccatctttttgacctaaagcctggactttaagccaggttgggcctgggggtagtggcagcaaaagcagcagccacagtgtcaaatataccaatgacttgagaaatctcatctgcacgtcattcactcagaacagacctggagttgtatacaagttaagaagggcagatctatatactcatgggcatggacacattccacacttgctggggagaatgagaggcacctgtttcccagctgcaggctgatgtccacatacaccattcacgtgtttacatttaggcctctgtattgtgtattcagtgagccagtgcaaatacatatttggggggcaccatttagtgcaacaccactccccacttgttctgggggacagtcaggagggatctggtcagctcctaattccctaggacaaaggtgcctccccctttccagcactcatatccagcagcgccatctcaggaatttttttttttaaacatgaacagcatgaggaagcaggcatggtacgacaggctcagccccagcccagatagcattcacatcttcctggatgggggttgatgcccatcactcacctgctctttagcaccgccttgtgttggttactcagggcctggggagaggtgggggggattgtagatccatggtgggaaccatctcacacccagagttcacctggccacaggccagcaagcaagtccaagtgcacagctctcgaccctgagcctcggcacctccggctgcaatttctatttatatatcaggattttaaaaaccaaaaataaacaaacaaacacaaaaacagccactttgattgaggagaaagtgggagcctaaagcagctgaccctcaaacatctccgccaagccccaggccaggccatctgaacactccaaggccacatgatagttacagaggatgacagtttccacaggtacttgtcaagcactgggctagcttctcacagagtctcagaatgcctcctcgccaataccctgtgaggggaggcctttcctcactagggcacaagaggttcctaagctcttcccaggaaatggttaacaaagtgtggagctaggggaaagcccagtcagaacaagtgactagccagggtcttcctagactccatcccttcctccacatggggcccagaggtgttgcgagcagcctcctgaccccctccatcccactctctcctcaatcaaaatggctgtttttgtgtttactcgtttatttatgggattttaaaaacctgattttttttttttttttgagacagagttttgctcttgttacccaggctggagtgcagtggcaccatctcagttcactgcaacctctgtctcctgagctcaagcaattctcctgcctcagcctcctgaatagctgggattataggcatgtgccaccatgcccagccaattttgtatttttagtagagaaggagtttctccatgttggccaggctggcctcgaactcccgacctcaggtgatctgcccgcctcggcctcccaaagtgctgagattgcaggcatgagccaccgcttctggccaaaaaaaaacccctgatattttatttatagtactttcaggcttgtatgtatgtatttgtataggctttattggaaggaagagggcttaagacagtaacatttttaaaaggtctcagtggggaatagacttccatggcacaaatgatgatgttgacctccttctgttgcctttgggcaaagtataaatagtgtgagaattggcatgtgctgggttgtggtttcagtgtgggagggcagttccttaagatggaaactgagctgtaggagccacactcaccttttatcacattccccaccatggtctttcacttttcttctgtgcttgaatttctttcaacatacatattattttgagtatatatatatatatatatatatatatatatatatatagacacacacacatatatatgtgtgtctgtgggtgtatgtatatatatgtttgtgtgtgtgtgtacacatacaggtctcactctgtcacccaggctggagtgcagtggccgaatgatgggtcacttcagcctcaatctccagtgatccttccacctcagcctctcaagtagctgggactgtaggcatgcaacatcacacaaggccaatttttaaaattattctagaaactgagcctcactatgctgcccagactggtcttgagctcctgggcttaagcaatcattccaccatggctttccaaagtgtttggattacaggtgtttgccatcaaacccagccaaaaacatttttaaaagaaccattacaaccgaattatgagctatggttgtaccactgcactccagcctgggcaccagagtgagaccttgtctccaaaaacaaagcaaaacaaaaaaaacttatgaccaaattaaatttctgaggttgtgtcatctgtgtcccctttctgccctgtaagctatcattgttaaatataatggctattgagaaaactgttagatattaagaaattcctatatatcctctaagtgagaataaggtattctgatgtggcccaatatttcctaacctctacctccagggtctaaactagcaaatcaaatcaggacaaccgacaaaggactgttggccattttcaaatggaagatgaaataccctgttagtgagagtaatccagtaattttaaaaaagagaagtcagactgagatgcagtgcagtcagggcatgattaccctggaatagccacttcacacggaacgatagaggagcctgtctaagatgaacaaatttgggtaacataattcttgcttaaccattctcagcctctgctgcccccgaccccagccccattccaaatggacatcccacgatatggtcagcagtgtggtacagcatggttagaaaggggctcagggatgggatgaagatctttcctgcattatcaaaatgattgaaaagttgttaaaaaaaaatgtccaaatgggcgggtcgcggtggctcacgcctgtaatctcagcactttgggaggctctggcgggcggtcaggagttcagaccagtgtggcgtcaggagttcgagaccagcctgggcaacatggtgaaaccctgtctctactaaaaatacaaaagtagtcgggcgtggtggcatacgcctgtaatcccagctacttgggaagttgaggcaggagaatcatttgaacccgggaggcggaggttgcagtaagccaagatcgcaccattgcactccagcctgggcaataagagtgaaactcggtctcaaaaaaaaaaaaaatccaaatgatcttttcttacccttaagtagcaaataagatgcattatacaagcagacccaggtaagggaaagagcaagtgcatttcaagtctcagctcacttcttaattagctgtaattccctgtgcattttaccctacctactttagcctgtttttctgttcataaaacgcactaatgctgaacggggcgggggcagggggtgggggtgggagtggtatggggagagtgccggtccttatccaatccttggcgctggagcggcaaccgcccaatcaagcgcgcagttgaagaggagtgcatggtttccggcatttggctgggcctttgtctctcgctcccaccagagcttggaatccgtctctgctcttctgcattctccacctcgggagcccctggggactctgtgacggcctctgttgccctgtgatctgcaggtccggagagacgcacagctaagatgtcaggacatcctggaagctgggaaagggtgagtgtgcggggttgggcatcccgaaaggagagagcgggctgtgaaaccggcgggactgccttcgtcaccgctcccgggtttccgacctgaggtccctgctggcgcagttcagccccaggcccctctggccgcaagatggcggctgggcccgcagccgggatccccgcgttcagccccgtccctgcggcgcccagtctggagctccctgggcagctctgcatgcagccccgagtatttcccagattgttcagggatgccaggcggatcatcagggcggaatcctgacttggtgtgtgcgtggcaggagctgcggcaggtggggctcccgagtctcttttcttaaacattttgtttgtttgagacggagtcttgccctgtcgcccaggctggagtgcagtggcacgatcactgcaaccttcgcctcctagactcaagcgattctcgtgcctcagccctccgaaaagctgggattacatacctgcgccaccacgcctggctagttttgtatttctagtagagaagtggttttgccatggtggaagctggtctggaactcaagtgatccgcccgcctcggcctgaccgggaaatagaagcctgaactcagtgactcaagctaaggatagtttagttctgccggcggagcctctcctgcagatgtcccagcctgctcacaatagccatggacagaacctttatgcttagagaagctgcagagccctgaaaatctatacatccacaggcagatgcagttggggttggcacaaaaatggggttgggaggctttttctgggaatagagttattgttctgaggttgtttctagattttgtgatatatgacaaatttagatttaggtaagtgggttttttttttttttttttttttcttttgtgccagagtctcattctgtcacccaggctgtagtacagtggcacgatctcggcacactgcaacctctgtctcccagattcaagcgatcctccaggctccctagtacctgggactacaagcaggcgacccgacgcccagctaatttttgcggggtttcaccattttggccaggctgttctccaactctggacaagaggtaatccacccacctcggccttccaaagtgctggaattacaggtgtgagccactgtgcctggcaagaagttacttttttttttttttttgagacggagttgccctcagtcgcccaggctggagtgcagtggtgcgatcttggctcactgcagcctccgcctcccgggttcaagcgattctcttgcctcagcctcccgagtagctgggattacaggcacctgccgtcatgcgcagcatgaagttacttaattttaaaggagtattgcagcaaggggaaagcaccagctataagatattggagaattttaaaggttagagagaaaaggactttctttcataagaagaaaagaaggtcagaaaaaaagtgggaaggggagggagggatagaacatggtgaaagcagatgctagattagggaatattttacccagaagtcagcctggtttttttgttgttgtttgttttttgtgagatggagtctcgctctgttgcctaggcaggcgggcactggcgtgatctccgctcactgcagcctccgcctcccaggttggaacaattctcccacctcagcctctcaggtagctgggattacaggcgcaccaccatgcctggctaatgttttgtatttttagtataggcggggtttcaccatgttggccaggctggtccaaaactcctgacctcaggtgatccaccctcctcagcctcccaaagtgctgggattataggcatgagccaccacacccggccaagtcagcctgtttttgaggaacataggccgagtgcggtatttttaatataaaaatacaaaaaattagccgggcttggtggcacgctgtattcccagctattcgggaagctgaggcaggagaataacttgaatctgggaggtggaggttgcagtgagccgagattgcaccactgcactctagcctggtgacagagcgagactcggtctcaaagaaaaaagaggaacataaagaggggttgtggttgggtcaaaatttgggagcctgaggaaagaaagaaacctaagcaaagtttgattaacaggtattttgttctaactactgaagacgaatgtattaattgtttataaggcaaaaaaatagcaatttagacagtctgtggcttcataatatcaaaaataggaagggtgtttctttgcaataagatgctcttgaaaacacaaaagttcaggaatttctttaatcactgctcttacctgcccacttcatcttccaccatgagttttccttgccctgtatgtttcttacatttagcttttcctgacttgtgtgttttataacaaactggtaaatgcaagtataatgcttttgttttgttttgttttgttttgtttttttgagatggaggctcactctgtcgcccaggctggagtgcagtggcgcgatcttggctcactgcgagctccgcctcctgggttcacacctttctcctgcctcagcctctccgagtagctgggactataggcgcctgccaccatgctcggctaaattttttttttttgtatttttagtagagacgcggtttcaccgtggtcttgatctcctgatcttgtgatccacccgcctcggcctcccaaagtgctgggattacaagtgtgagccaccgcgcctggctgcaactataatgttttgctaagttctgtgagtagctgtatcattatttaacttgagaagattatgagagcccccagtttataggaactggctcagaagtatagatgagaccctaggaattgtgactgggatctgcagtggtggcagtgttgtgggactgagccctgaacttgtagggtctatgctgactcaaggaggtatcagaattgagttattggacaaccagttggtgttggagaattggttgctgttcagcaaactccacacatttgttgtcagaaaaagaatatcacagatatttgagctggagggagactcttggtttctctgggaaggggaactctgttctgcacacaggctgtcacaatgcacattgtcctgtgattccagatctcttcccagggtgaaaggggactgagggcttggaagaaagaagttctgaaaacagactccctgccctcaacctgctaccaccaatgatttccgcctactaatgaacatacccactaggaatgggtgtggccagaatcttcacaaaacaagaagacttgatctgaggaattactctatagtggctttacctctaaaatttctcaccaaagaattacacaagtgcctagaggactcctggattatccctaccacaaaccctgaacctgaagcagcaacctggtctctctatcaccctgggcttgtggactaccaatcataatctcatccacctgcatggacacaggaatatgtcagaacataaccctgcctgaatcagtatctgtagcataaaccagtctttccagctaccatgcactgtcccccactcacgggtccttgatagcacctttccctcttctgtcttttgcttttctacaaaccctttctgatgtgcacagtgtgcctcaggtgcctgaatccagcacctactgggagtcagatgtccatgagttcaagattatagccctagacctggctgtcataagaacagacaaaaattagaaatacagtcttcatccttgaaaataaaagatttttctctttccttttcttaaagcatttactttagaaaacttttgtatttatttatttttatgttttttttgagactgagtcttgctctgtcacccaggctggagtgcagtggcacaatctcggcttactgcaacctccacctcctgggctcaagcagttctcctgccttatcctcccaagtagctgagataacaggcgtgcactacaatgcccggctaattgtttttttattttttattttttttgagatgtagtttcgctcttgtcccccaggctgaagtgcagtggtgtgatctcggctcaccgcaacctccacctcccaggttcaagcgattctcctgccttaacctcctgagtagctgggattacaggcatgtgccaccacgcccagctaattttgtatttttcatagagatggggtttctccatgttggtcaggctggtctcgagctcccgacctcaggtgatccacctgcctcggcctcccagagtgctgggattataggcgtgagacatcacacctggccctaattttttgtacttttagtagagatggaatttcaccatgttgactgggctggtctcgaactcctgacctcaggtaatgcacccgcctcggactccaaaagtcctgggattacaagcgtgagccactgtacctggccagaaaacttttatataattcttttctgcctacttgaaatagatacaaattattctaactgctaaataggctttttgtcagtatttttgactcaggactgtttttagaacctaggaatcatttatttaaaatgtaaatagcaaagaaaatagaactttattccattttctgttggaagataggagtttaccttcagcacagtcctggttccaagtttcaaaactacctctcatgaagacattagtttatttttcctttaattatagccaattagcaaccaaagaagacctccaatttttaggtgaatttaagataaactgtatgtgaccaatggtgctgtcagttcttctacttgagaactaattatggtggctatttgcaattgagtgtctttgcaatctcttagcagtttgcttataatggccttcacattctggagtaattctgtaataatttttttttctcttctccagttgtgtataatttttctgaggcttcagataattctgtttataattatgtttctctaagtttgtccagaattactaaacaggatatgaacacatactgtgcccaccatgcttcattctgtatggaccagtcacaacatacaattgtgcaattgggcttccattcacaacacacaattgtgcagtaaagtgcacactgccctcaaagtctgcaggcagaatggcctttcttcgtatttgggatctgcaatcattaatagcatacttttaccagatttctacgaaaattactacagggcaacaattaactattccagctctgtctttctatccccctggcatcttcagatgcgaaattctttcaaataccatttggcctgaaaactcaaccaggttcacacatttgcattgagtaagcctgagaatctaaacattttgcttattctcttgtccaaatgcctatgcatgtggcaagggtgcctttggcttgcttttctgccctcctaaacctaaatctgcagttccaaattttgagtccagctaatagggttctccattctgtgttggagcagtcttcatgtggggatttctcctctacttttcctctcctcactgtaacacaatatggagccaagttaatggtacctagaatccacacataagggctgaaatccacctgggattaacaagacagggccaggctttggatcttgtccagtgaaattttgagattgtgtgaggagctcctggtataaactgaatctggtggcagaatctctaagtgtaaagaagcatgttagccaagggaagttagggccacaactgtccagagccatgaatgcatgaatgcaaccccatctcctatgtgtgagttgtattactggagaaagtttttttgttgttgttttttatttgtttatttttttatgagacagagtctctgtctgttgccaggctggagtgcagtggcgtgaccttggctcactgcaacctctgcctccctggttcaagtgattctcctgcctcagcctcccaagtagctgggattacaggctctcatttcttgatacttgggtgaagaacaagtaggaggtctggaggctcaaactgatatgtaaacaaattgcttttattattattatttgccattagaaaaacaggtgaaacagtcatggactctactattcaggaattattattctagagccagtaaatacatggttgaattaagagtaatgtgatcagaatgaagaagggagttgcacagaagacttgggctttatttgggacactgctcttatgttgttgtgagttctgatgtcaccacctgaagggacatcatagacagaagagttgttacaattatttctgttgcttttcccttgttaagaatcgtttctaatatagtttttctagaaagtactacatgttttggttaagtcggttgttagtgtgtcatgcaaaatagagaagaggcttaaaccattaaaatcagaaaaattctgggagtcaagttcttgttggtccagcttagaaaagatagaacacaaaataagccagcagcacagagaagagaagctgagggccaactccctgccccagccctatccagacctatgctctatgagccttgtccaggtctggccccaccctgaaatctcccctcacagaactaattagaactaattacaggagatcagactcctgtttggaacaactattggatctgcagaagtgtaaaacgggtgtctacccttggtgtttcttcagagctggagctcagaatttttccaaacctaaaagcaaataaatgagagcaaaggagtatacatttggaatcttaatgtctttctttctcaatgaaaccagtgcttacattttacacagcaacctgttttacacttctgcagatccaataattgttccacagtcatgagaaagtaaatagaaacacaacaattaaaagtctctctacttatcccttcctttctatatccctcccatctgtctgtatttagcttttatagtgatagggaaaccagaagaaatagcctaagccatcatctaaatcctactgggaattatgagacacttagtacccacctttcaaaattttttgaggcttaaccgacacaatgcgagtttcccagcacagcacattacagcatacatggtgagcacatagtacaagctcaataaacactgtattaatgtatgtgtacatgttgttcaaatgcagatgtagacattactacattctccagcctctgtaaactttaaaaagctggcaaagcatgtgatcctctgagacagtgacttgtggtcttcactgtaacaaaaagtatttgtgttgcaataaaggtattagatgtaagggactctgtgtgctatactttctctgagtgctggagagcaacatcagcattaacagggaactttcgataaagaagccaatttctggacccctccaaaacctgcagaatcacattagttagagagtggctcagaataccaaatgagctatatgcacatcgaagcttgagaagcaatggtcagctaagtggttcttagcccaggcttccagttaggatacatgacaagtttgaagaaataccagtgagaggtgacagcgtgctggcagtcctcagagccctcgcttgctctcggcacctcccctgcctgggctcccactttgtggcatttgaggagcccttcaggccccccactgcacttgggagcccctttctgggctggccaaggccggagcccactccctcagcttgcagggaggtgtggagggagaggcatgagcgggaaccggggctgcgtgcggcgcttgcgggccagctggagttccgggtgggcgtgggcttggtgggccccacactcggagcagccagccagccctgctggccccgggcaatgggggacttagcacccgggctagtggctgcggagggtgtactgagtcccccagcagtgctggcccaccggcgctacgctcgatttctcgccgggccttagctgctttcctgcggggcagggctcgggacctgcagcccgccatgcctgagcctcccacccactccatgggctcctgtgcggcccgagcctccccgacgagcaccaccccctgctccacggcgcccagtcccatcgaccacccaagggctgaggaatgcgagcgcacggcgcaggactggcaggcagcttcacctgcagccccggtgcgggatccactaggtgaagccagctgggctcctgagtctggtggggacgtggagagtctttatatctagctcagggactgtaaatacaccaatcagcaccctgtgtttagttcaaggtttgtgagtgcaccaatccacactctgtatctagctgctctggtgaggacgtggagagtctttatatctagctcagggattgtaaatacaccaatcagcaccctgtgtttagctcaaggtttgtgagtgcaccagtcgacactctgtatctagctgctctggtgaggacgtggagaacatttatgtgtagctcaaggattgtaaatacaccaatcggcactctgtatctagctcaaggtttgtaaacacaccaatcagcaccctgtgtttagctcaaggtttgtgaatgcaccagtcgacactctgtatctagctgctctggtggggccttggagaacctgtgtgttgaaactctatatctaactaatctgatggggaggtggagaacctttgtatcttgctcagggattgtaaacgcaccaatcagcgccctgacaaaacaggccactcggctctaccaatctgcaggatgtgggtggggccagataagagaataaaagcaggctgcccgagccagcattggcaacccgctcaggtccccttccacactgtggaaactttgttctttaactctttgcagtaaatcttgctactgctcactctttgggtgcacgctgcttttaagagctgtaacactcaccgtgaagatctgcagcttcactcctgaagccagcgacaccacgagcccaccagaaggaagaaactccgaacacatctgaacatcagaagggacagactccagacgcgccaccttaagagctgtaacactcactgcgagggtccgcggcttcattcttgaagtcagtgagaccaagaacccaccaattccggacaaaccagtacctgtgtcttccctacaggttatgttttttcatgattagattcagattagtatttactttcctctccactaatatcacggcagtaattatgggcccatctgtgcattggcctctggatccaatttgtctaattacagctgacactaactttattcatctggctaaggtgttttctgccaagtttcttcactataaagttatttttctctttattatgaatgagtatcttggagggatggatttcccaagtgaggtttataaattgtcacatttaattgaaaaactctgtttctttttctttttaggtttttttgtttgttttttgcttatagcttgctttggagaacaaatctcatttttgttgactgtagatatcagcttttgaaactggaagttctaaaaaaggtatcagttttgtaggtttttattttatttcatctttattttacaagcatacatttcattttctgtattttcagagaaagagaacaaaaattaatatatagctaatatgtcatcttaaaaatctaaaatataacatggcacataaagccaaaaaaaaattttttttttttgagatagaatcttactttgtcgcccaggctatagtgcagtggcacgatctgagctcactgcaaccttaacctcctgggttcaagcaattctcctgtctcagcctcccgagtagctggtacgacaggtgcatgccaccatgcctggctaatttttgtatttttactagagacggcatttcactatattggtcaggctggtctcaaactcctgacctcaggtgatccacctacctcagcctcctaaagtgctgggattacaggcatgagccactgtgcccggccaaagcaaaaaattttaagaaacacccgattcagtaacaatagctcttaatttagtttatatcattaaatgttttgatcttcatccttgttttaggaaacacaaaaaagcatgcacaaagaggcttataatttttatataatttaaaatatttcttcatttaaacagaaatgttctactctccaacttttcatgtgtacatacttaccatttctgtgggtgtgtgcataaaatgtaagcatcatttgatcaattttctgttgttgccttgtttatatcaatcttctcagttatgaaaactgctctggatgttgttttacagttatctctgtatattggctcataagtccttttgagataaatttcaagtcagataaataggggtaaaacgcaaagctcagctgggcgtggtggctcacgcctgtaatctcagccctttgggagggtgaggcgcgcaaatcatgaggtcaggattccgagaccagcctggccaacatggtgaaaccccatctctactgaaaatacaaaaacttagctgggcgtgctggcaggcgcctgtaatcctagctactcaggaggcagaggcaggagaattgcttgaacccgggaggcggaggttgcactgagccaagattacactactgcactccatcctggcgacagagcaagactccgtttaaaaaaaaaaaaaaatacaggctgggcgcggtggctcacgcctataatcccagcactttgggaggccgaggcgggtggatcacgaggtcaggagattgagaccatcctggctaacatggtgaaaccccgtctttactaaaaatacaaaaaattagccgggcatggtggcaggcacctgtagtcccagctacttgggaggctgaggcaagaaaatggcatgaacccgggaggcagagcttgcagggagccgagatcgcgccactgcaccccagcctgggtgacagagcgagactcagtctcaaaaaaaaaaataaataaataaatacaaaaatagcactcaaaaatgtatattcttatattgattcgtgtttatattttgttttatatgtgcatatttatgctagttttgtggatcttatatttccacagaattagagaatatattcgaaatattactgtgtttaaaagtatcttatttagtaactcaggtcactcataagtcagaaccagttgtcttaactttcttatttcatcttgggtcaaattaggaactctgcccttgactgcatgatcaatgtgttatttatttttattagagaaactgttgacattcagggatgtggtcatagaattctctctggaggagtaaaaatacctgaacccttctcagcagaatatgtatagagatttgatgttagagaactatacatacgttgtctctgagtcggaataacttaccttcagaatatctaatgtctaataactatgataccgtaccttgttttaacctgattgtctctcttagctgagagagccggacagactccattttagtttctttacttgcagcccctttacccctctcccttaagggcataaccagtgcaagctgactccaagcacatccaggaatacacttactgataagatactgaggcaagctgtaccagcagctcctgggaatgcgctcaaagcccctgcgtttatcactttgtgatagtttaagcccctgcacctggaactgttcattttttctgtaactgtttctgtaaccatttatctttttaactttttgcctgttctgcttctgtaaaattgcttcagctaggctcccccctccccttgtagactgaggtataaaaggaaatctggccgggcgtggtggctcacatctgtaatcccagcactttgggaggccgaggtgggcgaatcacgaggtcgggagatcgagatcatcctggctaacatggtgaaaccccgtctctactaaaaatacaaaaaattagctgggcgtggtggcggcgtctgtagtcccagctacttgggaggctgaggcaggagaatggcgtgaccccgggacgcggaggttgcagtgagctgagatcgcgccactgcactccagcctgggtgacacagcaagactctgtctcaaaaaaaaaaaaaaaaaaaaggaaatctagccccttcttcggggccgagagaattttgagcgctagccatctctcggtcgctggcaataaaggactcctgaattagtctcagagtgtggtgtttctctacaactcgctgggttgcaacataacaagggctttatttctttcctttttagaatgtctccttgggaggtagtgctttgtctgaatgaatttcagagttttgctttcaggaaaaaaaaaattctaagtttgttgatgtagaaaaaaatcttcctagtgtttccagccctcccccttagttttgattcattcaaacttgaaaatgaagcacagaatttctaaacgtaaaatacttcctacatattctaaagaagctggtaggaaacagtattttggggaataatttttaaaaatcttatataatgtccccttttctccactgagcacagtactgagctggcaattacatatcctccagcattaatcatctgactttttattaaaaaacaggtcttgccatctctaagctggacctggtgacctttttggagggaaagaaagagccctggactgtgaagagtgaggagaccatagctgcacagccaggtaagtgggagtaaagatggtaggtggcctgggtgagaggttcaaaggtcaataagccagattttcttttgtcttccattattttattattttttatatatatatatatatatatatatatgtgcagatctgttttatgtgcaacaattgattctatcagataatcagaccaaggcattccactggtaattttccctcaaatcaattcaggtgaaattagatatttatgtacttcctgggctatcaaaacttgagatttcattatcaacttcagttctgaagccatacacacaattcaaaatatacattaactaggttaagtcaataaaagtgggctgaaagaaaccacaggattcaaacaatgaaaccatgtattttgtttgcctgagagtcacaatgtgaacaacaattatttcgcatatctcatagctcttcagtgtagagggagtggcttctgaacataaggtcattgcacagcaggtgggcaaacagctggtgtggcctcctggaggcttcacccagtgctgatttcttctctgcctctccttttttaggttctatttttttcatctttcatctttcctttttttttttttttcccttgagatagagtcttgctctgttgcccaggctggagtgcaatggtgcaatcttggctcactgcaacctctgaatcctgagttcaagtgattctcatccttcagcctctgaatagctgggattacagttgtgcgccacgatgcctggctaattctttgtatttttttttagtagagacagggttttgccatgttggccagtctggtctcgaactcctgacctcaagtgatcctcatgcctcggcttcccaaagtgctggaattacaggtgtgagccactgtgcctggcctcctttcctattttcctatttttttctccctttttgtctctctctttctatgtgtctttccctctgtttctctcttccttttttttgttttgtatttctctcttcctccttctctctttccctttgtttctttttaattttttttccttgtagaacttggtttattttttccttccttcctacctttctttcttcttttcttccctcctttcctcccgcctgttttctttcctactacatgagcatgccatcatgcctggctaaattttttatttcttgtagtagagacgaggcctcgctatgttcccagggctggcgtcaagctcctgtgctcaactagttcttccatttcagtttccccaagtgttgggattataggtttgaggcaccatgttctgccctctttttattttctttttcattcttcctttttttttttttttttttgctctctctcttgcttgcttgcttctttccttcatttctttctttattctacatttttctttttttcttttttcttttctttttttttggagatggagtttcactcttgttgcccagcctggagtgcaatggcgtgatcttggctcaccacaacctctacctccctggtttaagtaattctcctgcctcagcctcccaagtagctgggattatagacatgtgccgccacgcccaggtaattttgtatttttagtagagatggggtttctccatgttggtcaggctggtcctgaactcctgacgtcaggtgatctgcccaccttagcctcccaaagtgctgggattacaggtgtgagccactgcacccggctctttttttcttttcttctttttttttttttttttttttttgcgttagtctcgctctgtcacccagaggtaggtgggaagctctcagacttagtcgccagagggacagctttgggcgcgagctccacacgtggcctgcagggtggacctagtggcttcctggtcacaccatcaggtgaccagatgtgggctgagctgtggccagtacttgtggccgctggccacacgtttgggttgatcagagattcaaagcttaggaaggaaggtcagcagacttagaggccggccactgaggtgggccaccttggggggaataagtttccaacggggacagcttcaggccgcaagcgccacacatggcccagggtggaactggtgggcttctgcctccgccatgagctggcttctccttctggctgccaggtctacaggatgtcggccacaagcgtaggacttggtcgccagcttaaaatgtttaagggggaccagatggttctcgccagtgcagtaccgcttaggtccaccagaaaagctcaatgatggctcactgtgccctccaccttcctgggctcatccaggtgatcctcccattttggcctcccaaatagctggggatctggggatagttctgtgttttgtttgtttgtttttttctatccccactttgagtttgtttccacagtacattgagttttgttggtttttgttttttgggttttttttccctctctctctcatgctccttcctgtacactgcagttgctgttgttttagatttctttcacctaggcttaagtgcagttacttgatcacagctaactacagcctcgacctccctgggctcaggtgattcttctgtttcagacaccctgcttccttagtaactgggactaaaggtatacggcaccacactggcacattattttgcatatcttgctttttatttttgtagagatggggttccatcatgttttccaggctgatctcaaactcccacggtcaagcgatctgctggcctcggcctctcaaggtactgagcttacaggcgtgagccaccatgcctggttctatctctgtctgtctgtctacctacctaactacctacctacctacctacctacctgtaatcaatctatcatctatctctcctttttttttaagaagagacttggtcttgctatgtttttcaggctctggttttatatatatatatatatatatatatatatattttttttttttttttaatttatttattattttttaatataggggttgtctcaccatgtggcccccaggatagtctcaaactcctgggctcaaagtatcctcccgccttgacctcccaaagtgctgggattacaggcatgcaccaccatgcacaatctggtcatatttttgatgtgttgattctttccagtccagatgtataatctcatccctgaacatttctgatggtgtgattatgacatgtgactttatctggcaacagagtgagttgttgctcccgcctgagcccagcccccagaaaggattgtgacatatcgttggacccagaattgaggtaatgtaactattccactgccttggcactgcccacagaagacattgtgacatattgctgggtcttgtacccaggtggtgtgaatcttctctcctgccttggctcttccacagggggcattgtgtcatatcgctgggccccacacataggttatgtgactcttctgcctgtgccctgcccatgtggcccattgtgacatactgttgggtcccaaacctaggtgatgtaactctactgcttaggccctgcctacagaggacattgtgacatatccctgcatccatcacacaggtaatgcagctctcttctgcttggcccctactcacagaaaggattgtgatgtatcacagggctcagcacctagctaacatgacttttctcctcttctaggtttttgcccacaggggatattgtgacatgtcactgggcctaatactagggtgacagtactcttgtgtcatggcactgccctcagcaggtgtggtgatatattactgggcccagaacaaatgtgatatgagtctcctgcctggaccctgcctacaaggtgcattgtaacatatctggggccctttgactattttattttatttattgtattatattttatttattttaattttatttttgagacagaatctcactctgtcacctaggatggagtgcagtggcgtgatctctgctcacttcaacctttgcctcctgggttcaagtgattctcctgcctcagcctcctgagtagctgagactacaggtgtgtgccgccacgtctggctgatttttgtgttttcagtagagacaagatatcaccctgttggccaggccgatatcaaactcctgacctcagccagtccacccgccttgacctcccaatgtgctgagattacaggtgtgaaccattgctcttggcaccctttgactattttatgtgactcttctctcttacctggacattgaccaaatgggcccagcaccaaggtgatatgactctcctctcctgcctgggccttgcccttagaagagagagtgacttactgctgaatttagcatacaggtgatatgattcttctgctgactcgcagaagtcactgtaacatatatgtgggcccattgctgaggttgtgtgactctcttctccctgggacctgtccacagtagggattgtgacatattgcttggccaagcacctacattgtgtgactttttatttatttatttttttaagacagagttttgctcttgttgcccaggctggagtgcaataccatgatcttggctcagctgggattacaggcatgcgccaccacacctggcaaattttttttatgttttcagtagagatggggtttctccatgttagtcaggctggtctcaaactcccaacctcaggtgagccgcctgccttggcctcccaaagtactgggattccaggcatgagccactgcacctagcttcgatatgactgtcttcttatgccagggccctgccgactggagtgattttgacacatagctggggccagctcaaatgttatgtgactccacacttcttcctgagccctatctgtgaggggcactgtgtcttatctctgagaccgttaattaggtaatataacttttatttttttgagacagagtctggctttgttgccccggctggagtgcagtggtgtgatcttggttcactgcaacttccgcctcctgggttcaagtgattcacctgcctcagcctcctgagtagctgggattacaggtacacatgccaccacgcccagctaatttttgtatttttagtagagatgaagtttcaccatgttggccaggctggtctcgaattcctgacctcaagtgagccacctgccttggcctcccaaagtgctgggattacaggcatgggccaccacacctggccaatgtaactcttttgtttggactgtcttcttggggtattgtgatatattgctgggcccagaatccgggtgatgtgactctgctgtttcatctctgcacaaaaagggattgtgacataccactgggtcaagaacctagatgaggtgactctcctctccagcctgggacctgcacacattgtgtactaagacatatcactgagtctaacacctaggtaatgcaactctcctgcatgggccctgcccataggggtattatgaaatatctttctgttaatcacctaggtgatgcgacactcctcttctacctgggaactgccaaaacaagtattggtacatatcactgggcccagcacataggtgatgtgactcttttctcatgcatgggctctgcgaactggggtgttttttacatatagttgggcctaaaccctaggtcgtgtgattcttttattttcctgagctgtactcacagagagcattttgacatgtttttgggcccgtaatttagatgatgtgactctcttggatgggccttccccggaatgggtattgtgacatattgctgagcccattatataggtgatgtgactctcttgcatgggccctccacataaggggtagtgtgacatattgctgagcccagtaggtgatgtgactcttctctatggtttgggctttgcccaagcagggattgtgatgtgttgctggactcaccacctatgtgttgtgactctcctcttctgcctaagccctgcatgcattgtgtgttgtgacatgcctggattcaacacctaggtgatacaactttatggcaggggaaccacccacagaagtattgtatcatctttccatcacttaggtgatgtgattcttttatttttcctgtttctggcatattttgggtatagtgacataccattgagttcaacacccatgaaatcggaggcttctgcctgagcccagcacataagtgaccttgtgacatatctttgcattcattatctaggagatttaactcccctttttgcctgcaccctgaccactgggaagattgtggcaaatcaccggtctcagcaatcaagtgatgtgtttttcctgcctggtccttgcccacagatcattgtaacatgtcactgggcctagcatccaggtgatgtgactctgctgactatattctgctttcaagaggagattgtaacgtatccctaatcgagcacccaggtggtgtgacacttctgccctatccctgcccttagagatgattgtgacatattgccccaaaaggcaggtgatgtgagtcttctggtcaatccctattcactggtgggattgtgatacatatcttatccaaacttataggggcaatatgactctcatacctctaaacaaccaatagcagatacactagttctcatagccagggtcaggaaaatgagtaatgtcttgggtttcttctttgtatgaaggtcataaagaattaacactctgtcacatactgtgtaaagtcgtcaagaggtacagggaatgtcctaacagaactcagcacacaggggaggttgcgacactcatatgcatagcctgccaacagtaaagactgtcatccttccacataaacacagctcactgttgaggttctgaatctcatacccagatgaagttgaaagttagaaaattaaatctcatgttaattcgatccatagagaggttagtgtctctgagaccaagattcagcacacctgtgagtcagtgacttcattaaaatgacagaatttgcaggaaggattgaagttctcatgcacaaatccagaccatcattgagactgtcactcaggtacttacacccaacatacagagggtattttgtctcatacctagaactaagaaatgtgtgaaattgttaatctcatacctcgaccttaattcaggtgtgtttgtgacatacaccttttttaagcacctaagtaatttgactctcctgcctgggcccaacgtacagatgggattgtgccatatttctggacccagcatttaggtgatgtgagtctattctcttgtcttagtgctttccacagagaacactggacatatcacagggcctagtgcccaggtgatatgactttcctctacttcctaggcttttcctaagaagggattgtaatatattgctgggtcagaacctaggtcgtgtgactctcctgtgctgcctggttcctcttgtacattgtgtattgtgacatgtggcttgttctaacacctcgatgatgtgaatctcctgcatgggccctgtccacagaggtattataacatatctttttattcatcacctagatgatgtaactcttttctatctgggccctgccaaaagggaggattgcggcatatcactggacccagcatctaggtgatgtgattctcctgttttccctgggcctcaaatattttggatattgtaaaatattgctaggcccactacctatgggattgcatgctcctgcctgggctctgcccacagggaccttgtgacatatatctgcgtccatgacctaaaaggtgacacttcttgcctgcactgtgccctgaacaggaaatattgtgacatatccctggaaccagacaccaggtgatatggctcttctgcccctgtcttgcccccagggagcattgtgacatagtgcttagctcagcacccaggtgatgtgactctgttgcctgtgctgtgctttcaggagagaattgtaacatatccctggctgagcacccaggtgatatgacactcctgcttgtttccttccctcggggaagattgtgagataccttggctgaaatcccaggtgatgtaactctcttgctaactccctacctacaggttaaatggtgacatatactatagtcagcttataagtggaatgatgactctcatacctctagtcagctattggaagaaatactgtctctcatagctcgacttagataaatgagtcacttccttggtcttctctttttatgaaggtcataaagaattgccacactctaacatattgtataatgccctcgagtgttacaaacgtgttatcccagggcacacagcacaaaggtgagattgtttcttatatgcacacctcaccaattattaggattatcaccctcacacagggaaagagcctatggctgaagtcttgaatctcaaatgcaaacagaatctcaaatgcaaacactgtccacagttggaattgtgactcatgtatgagcctccaaccacagttgagatggtgacacatttctaaactcagaacatagcagatgaggactctactctcttaaacccaacaaattaagagagatgttgactaatacctgggcttagggccacaagtatggtcatgggtgcttacaaacatgattttagagtaaattgtgcctctcatttatactggataaagcctttgagtagtatagtgtactaaccaggcgcagtggctcacgcctgtaatcccagcactttgggaggccgaggtgggtgaaacgaggtcaggagttcaagaccagcctgaccaacatgttgaaaccccatctctactaaaaaatacaaaaaattagctgggcatggtggtgggcacctgtaatcccagctacttgggagcctgaggcaggagaattgcttcaacccgggaggtggaggttgcattgaattgagatcatgccactgtactccagcctgggtgatagtgcgagactctgtctcaccaaaaaaaaaaaaaaaaaaaaaaaaaaagagtgtactaacaagacccagcacacagaggagattttctctttttctttttctttttttcttttgagatgaagtcttgctctgtcaccccagctggagtgcagtggcgcgatctcagcttactgcaatctccacctccgggttcaagtgattctcctgcctcagcctcctgagtatctgggattacaggcacataccaccatgcccggctaatttttgtacttttagtagaaacagggtttcaccatgctggccaggatggtctcaatctcctgacctcgtgatccacctgcatcagcctcccaaagtgctgggattacaggtgtgagccactgcagccggcctggagattttcactgttatatgaacacccatcaaaaagtatacatcatcatattctcacataaacacagcccacttttgaagttctggatcacacctagaggaagtcaaaggtggaaaaattgactcttatatatggatccagtccataggtgagttggtgacactcagagcaagattcagcatgcgtatgaggctgtgacttcactaattagacaaagtccacaggaggagtataggctgtcaggtacaaatttagttcactgttgacattgtaactcctgttcttagacacaacatataggaagggttaacctcctttacctaaaaccggaacatgtgtgggattgttaatttcatctctgcaccttcccacaggtttaattgtaacatttttctctgcccagcacctgagtgatctgactctcttgcctaagaccagcccacagatggaatagtgacacatagctgaacccagaactgaggggatgtgattctatttttctgcattggtgctgctcacaggggacattgtgacatatcgctggaccttacacttaaatgatttgagtctcctcccctgccttggcactgcctacggaaggcgttgggacatgtctctgagccctatgcccaggttatgtgactctcctgcctgttccccgaccacataagcaattgtgacatattgctgggtttgacaccctggtaatgtaactctactgccaaaaaggagcattatgacatatatttccattcattacccaggtgttatgactctcttctcctgcctggtccctgctcacagagggaattttgacatatcccttggctcagtaccaacaagtgtggttcttcttccatcataagttctgctggcaagggagatggagacatattgtggagctctatgccaatgtgacattactgtttgctttggcctggacctcaaaaggcattgtgacatattgctgggcccagcaacatggtgacatgagtctcctgtatggaccatgacaacagagcattgtgacatatctttaagagcatcaactatttgatgtgactctccttttctaccaaggtttccccacaatgagagattgtgacgtatcttctgacccagaaatcaggtgatgtgtttctcctgcctgagctttgctcatagggagcattgtgacatatcactcgtctcagctcccaggtgatgtgactgtactgtctgtgccctggtttcaggaggaaatttaacatatccctgactgagcacccaggttttaattcttctgcctggtgccttctctcagagaagtttgtgacatatccctggcctattacccagatgatataagtctcctgctcactccctatccacagtggagattgtgacatcttttttcagatcataggcacaatgttggctgtcatatctgaaaccagtcaataggagacatactatctctcatatgtgggcttaggtacatgggtaagattgtcactcttctctttttaggaaggtcagagaaaattacactctctcacatattgtataaagtcctcaagtggtatacagagtgtcataacggctctagaaaacagatgggattgtgatttatgtatgcacactttgccaattgttaagattgtcaccctcatccatggacaaagcctactggagaggtcttaaatcttacatgtggatgcagtgcagagttgaaattgtgactgtcatatgtgaacatcaggcaacagctgaggtggtgactcattagtaagcctagcttatagggaggtaacaactctcatatctggacccagtcattatagaggtgttaactctcatatctgggcatagagccacaggtacgattatgggtcgataccattacaattgtctcccagtcacaaaagattgcgactctcatgggaaccttataaattcctcggttggtacagggaatgttctaactaggctcattgtacagttgaggttttgacactcaggcacacccagccgacagtaaagattgtcctcttttcacatgaatacaatccactggatgttctgaatctcatatccagagacagttgcaagttggaaaatttactcttataagtgaatccagtccaaagttaagttggtgactttcagaccaagattgaacacactgttagtctgtgattccactaaggtgaaacagccagtaagagggattgtgtctctcattcaatgattcaattcattctaaaaatgtgacttgtgtacttggatttaacatacaggaggtgttgactctcataccaagaattggggtatatacaggattgttagtctcatccttggtctttccttcaggtgcagttttgacacacttctgtctagcagctgagtattgtgatcttcagaactggcccagcctacaaataggattgtgccacactgctggacccagcacctagatgatgtaactattctcctgccttggtgctactcaaaaaagacattaacatatctcagagccttgcacccaggtaatgtgagtctcctctcctgccttgctgctgcacacagaagcgggttatgtacaggattgttaatctcatttggaccttcctgcacctatgattgtgacacatgcctctgtgtagaacccaagtgagttttctctcctgtttggatttaacccacagatggaatcgtgacatatcgctgcaccagaaactaggtgatgtgactccatttccttgcctctgtgctttccacattaggcattgggacatatcactgggccttgcatccaggtgatgggagttttctttttctttctttctttctttcttttttttttttttgagacagaatttcgctcttgttacccaggctggagtgtaatggtgcaatcttggctcaaggcaacctccgcctcctgggtttaaacaattctgtctcagcctcccaagtagcttagattacaggcatgcgccaccacgcctggctaatttttgtatttttagtagagacagggtttctccatgttggtcaggctggtctcgaactcctgacctcaggtgatccacctgccttggcctcccaaagtgctgggattacagttgtgagccaccgtgcccggccagtgatgggagttttctctcctgctttggtgctgaccacagtgagcattgtaaaatattgctgccatcacccctagattatgttaactctcctctgctttgcccacgtggttcactgtgacatattactgggtctaaaacccagaaaatgtaactcccttatttaggttctgcctgcaggagccattgtcacacatctctgtgctcaccacccaggtgatgtgactgccttttactgcctagttccttctcacaaaacatcttgtggcatactgctaggcccagtacctggctggtgtgactcctctcttctttctaggttccacctgcagcaaagattgtaacataccgctgggcccaacagcataatgacgttattcttttgccttgggcctgccctcagaaggcactataaaatattcatggccccagcgccaaggtgatgtgtgtctccagcctggatcctgcccacagagggcattatgacatatctcttggcccatcagatgtttaatattatctcctcccatttcctaccctgtgtttgcctgtaagagacattgtcacatgttcctgggcccagcacctaggtgatgtcttcctgagacctgtccatatggggattgtgatatattgtgtggcccagaacttacttgatgcgactctcctctcatgactaggccctgcttacaggtgtgattgtgacacacagcttggcctagcccctaagttatgttactctgctcttattcttcagtcattttcacagggggcattgtgacatattgctagactgagaacttaggtgatgtgactctcctctactgcttggaatattcccaaaaagagagtttgatatattgcttagccaggatcctaggtgatgttactcttttctcctgcctaaaccctgcatacattatgtattttggcactggggccacaacctaggtgatgtaactctcctgcatgggctttgcctacaggggtatgatgatgtttcttttctttcatcacccaagtggtgtgactctccacttatgcctgggtcttgatgaaagaggaattgtgacatatccctggccctagcacttaggtgatgtaacttgcctttattgccagggcatggcatattatgaatattggacgtatctctgggactgacacctaggggatgagaggttcctgccttggccctgcccacaggaggctttgtggcatgtctctggcctcattacctagaaagatgtgactcttctcttctacctgcattcttcccacagagaagattgtgacatcactggatccagcaattagaaaatgtttctctcctgcctgagccttgcccacaggaatattgtgacatatccttgggctcagcacccaggtgatggaactctgccacctgtgccctgtctacttaggctattgtgaagctggtttcaatacccaggtgatgtaacattcctgccaggccactgccttccagggatattgttacgtacctttgtgccaatcaccaaggtgatgtgaatcttttcacctgcctagtccttgttcactaggggataatgatatctattgctggtttcagcaccaagctgatgttacttgcctcttcttcacagattctgctcacagaaaaactaacacatcactaggcccatcagcgaaattattttgcctggccctgcccttaaaagacattgtgacatactacagtgcccagcatcaatgtaatttgtctcctgcctaaaccctgcctactgggggcattgtgacatatctcttggcccatcaactatttgatgtgactctactttcttacctgggctttgccaatagtagagcttgtgacctatctctgggcccagcacctagatgttatgactctcccgcctggtccatgcacacaaaaaagagagtgacttatactaggatcaacacacaaatgattctattcttctgcattatcccagcccacatggcttattgtgacatctctaggttcatcatctagatgatatgactctccttcctgggaactgtccataatgaagattgtgacacatcacttggcccagcacctatgtgatatgactcctttcttttgcctgggcctatcagtttgggtgattgtgtcatatagctttactcagcaccttgattatgtgactctcctgtttctcctgagtcctacccacagaggtcattgcaacatatccctgagcccctaatttaggtaatttgactcctgcctgggccctaccctcattgatttttgtgacatagtttttgactcagcacctaggtaatgtgattcttctccactgcttggactctgtcacagaaggtattgtgatgtatcactggggctgacacctaggtgaaggtactgtcttctcctgcctgggccctgcataaattgtatattttgacatttcactaggttcaacacatgggtgattcaactctctcacatggaccgtgagcatggggttattgagacatttatttttgttcatcacctaaccgatgtgactcctctctgatccctgtcaaaaggaaagattgtgacatatcactggaaccagaacttaggtgatgtgactcttctgtctaacaaccacatattttggttattgtgacatttcactgggccaaacacctcagccctgtccacaggggttcttgtgacatatatctgcatccattacataaaagatgtgatgccttttctacctgcaccctccccacaggaaaggttgtaacacactgcagggcccagccaccaggtgatatgtctctcctgcatgtgcataactttcaggagaaaattgtaacatgccactggttgaaaacccagatgatgtgactctcctgccttttcacagccctcagggaaaaaaattacatatcatttgcccagcatccaggtaatgtcactctcctgggtggtttgtgccaacaagttggttggtaacatatatctcggcccagctcacaggtttgatggtgactctaatacctcctaccagccaatagaagagacactgtctctcacaggtaggcttagaaagaggagtaaaattcctggctgggtgtggcggctcacgcctataatcccagcacttcaagaggtagaggtggacggatcacctgatgtcgggagttcaagaccagcctgaccaacatggaaaaaccctgtctctactaaaaatacaaaaaattagccaggtatagtggcacgtgcctgtaatcccagctactcgggaggctgaggcaggagaatcgcttgaacccaggaggtggaggttgtggtgagctgagatcacaccgttgcactccagtctgggcaacaagagtgaaactctgtctcacaaaaaaaaaaaaaaagaaaaagaaaaaggagtaaaatcctggtggtctctctgtatgaaggttatagagaattaccactctcttgtatattgtgtaaagcacttggatggtacagagcatgtcttctgtaccataggacccagcaaacaggttagatcatgtttcatgtaagcacatcctgccagtttttaggattgtcatcctcacacatgaaagagcccactgactgatgaggtcataattctcatggatggatgcagtccatacttaaaattgtgactatcttatgtgaacatgtggccacacttgagatggtgaatcatttctaaacccagctcatagtggtgaggactctcctctctggacccagctaattggagagatgttaaatgtcatacctagacttgggaccacattagatcatgtgttcagagcaggttgcaactctcaggcacaccatatacagtccacaagagagtgtcctgacagagagaagcacacaggtgagactgaaatttatattcacacccagtcaataccaaagattgtcatccacttaaacacactcttcttttgaggttctgaatctcacttttggaggcagctgagtgttggaaaattgactctcatttgtggatttttgtccacagttgggttagtgactcgttaaccaaaattcagcacacctttgtgactgcaacttcactaaggagcataatttatttattttgagatggagttttgctcttgttaccgaggctggagagcagtggcacgatcttggctcactgcaaactctgcttcctgggttcaagtgattctcctgcctcagcctcctgagtagctgggattacaggtgcccaccactatgccagctaattttttgtatttttagtagaactggggtttcaccatgttggtcaggctggtcttgaactcctgacctcaagtgatccacttacctcagcctcccaaagtgctgggattacaggtgtgagcctccttgcctagactaaggcacataatttgcaaaagaaattgaggctcttatgcacaaatccagtccaccattgagactgacccctgtacttagacccaacatgcaggaagtgttgactgtcattccttgactcaggacatgagtgtaattgttaatgtcatcacaagacctttctacaagtgtcatgtgacatacatcttagcccagcatctgagttatttgtcttttcctgggaccagtccacagtgccatatcaccgggcccatacccttggtaatgtgattctattctgctttgataaagcgcacagtggtcattgtgacattgcttggtgttgcacccaggtggtgtgagtcggctcttctgccttggtgctgcccacagatgtattgtgacatattgctgggcctatgttatgtttatcttttgcttgtgccctaaacacatagcctgagtccaacgaccaggtgatgtaacacttcatcctggaccggtctacagaggggattgtaatatatgtcttcaccaatcaccctggaaatgtgacttacttttcctgcctgtccctaatcacagggggtactggaacatattgttgggcccagcacgtagctgatgtgacaatttttttttgggttctgctcacaaaagagattatgacatgtgattgtgcctaacactaaggtgatgttactttttttttttttttgctttggctctgcccttagaaggcattgagacatggctgggctcagcactaagaagatgtgagtcctctgcctgaagcctgaccacagggagcattgtgacacatttcttgacccattacaatctcttctacgggcaaagctgaggtaaatgcccgttttacctatgtgatgtgacattcctcttctgcctgggccatgcccacagaatagagtgacgtattggtggggcaagcaaaacagtggtgtaattattctgcctggtccctgtacacaggagtcactgtgatacatgtttgggcctcccacctagatgatgtgacttttttcttctggagtttgtccacagtgggaattgtgatatgccacgtgacatagctcctatgtgatgtgactctttctcattcttggcctctttccactggggttactggaacataaagctgagcccagctcctaggctgtgtctctcctttctaagccctacccacaaaggacattgtgacgtatctctaggcttctcacctaggtaatattacttttttacctaggcccacccctcaggggtattgtgaaatactgctggaccaacatgctagatgataggagtctctgctactgcttggggtgtgattaagaggaaattgtgatgtgcatttgggtgcatccagcacctaagtgatgttaactctcctcttgtgcctgagacctgcatgcaatatgtgtttttgtgttttttgtttgtttttgagatggagttttgctccttttgcccaggctggattgcaatggtgcaatctcagctcaccacaaccttcatctcccaggttcaagcaattcttcagcctcagccccctgagtatctgggattacaggcatgtgccaccaagcccggttaatttttctaattgtagtagagatggggtttcttcatgttggtcaggctggtctcgaactcccaacctcaggtgatccaccgacctcagcctcctaaagtgctgggattaccggtgtgagccaccgcacctggctggcatcatgtatttcaacatgtctctgggtccaacaacattatgatgagactttcctgtgtgggctctcacacagaactattctaacacatcttttcattcattatcttggcgatttgacttttctgttccgcttgagcactgccaaaagaaaaatttgtggcagatcactggacctagcacctaggtgatgtggctcttctcacttgcctgagacctgcatattttggttattgtgacatatcactgaaacaaacacctaggggttggaaggcttctgcctgagcccctcccacagagggccttggaatatatttttttatccatcacctgggagatgaaaccctctacttctacctgccttcttcccatagagaagattgtgatatattgctgggcccaggaaccaggtgttttgtctatcttttctgggctttgcctacagtgagccttgtgacacccaggtgatcatactcttcttcctatgccctgctttcaggagaggattataacatctctggttgagaactctgtgatgtgactctccttgctggtgcatgctgtcagggaagattgtgacataaccctggctcagcacacagttgatgtgactcttgtgcttgttctctacccacaggtggaattgtgacatataacttggccaagcacacagatgtaatggtgtggtgactctcatacctagaactgggacctgtgcaggattgttaattcattactggacattcctgtgggtgtgattgttacatatgcctatgttcagcacccgagtgatttgattttgctgcctggtctcagtccaaatgtaagattgtgatttatcgctgaatccagcacctcggtgatttgactctccctttttttgtgggagggatcctgcaaattttgggtattgtcaattattgctgaatcctgtacccatgttatgactctcccaaatgtgccttacctgttgtggcacaatatatcacattagacattgttaaatattgttgggttcaacacctgggtgatggatgtaactttttttctgggcctgcctacaggggaccttgtgacataactcaatgcccatcatcatggtaatgttactctcttctcctgcctgatctctgctcacagagaaattgtgacacatcactggcctagcatctaggtgatgtgactctcctctttttttcaggctctgcatatttgggtattgtgacatattgctgaactcaacacctaagggatgggagtctcctacctaggcccttcctacaggggacattgtgacatgtctctgcattcctcatccaggagatgtgactctccttttctgcctacaccctgcctacacagaaagttgtggcatattgctgtggtcagcaaccagatgatatatttctcctgcctgggtctttattacaggaaagatgattgacatattactgggcccagcatccagatgatgtgactctcttcttctgttggtccttgcttacagggaaactgtagcatattgctacacccaacacctagcttatgtgattcttcttttaggtttgccttcagggaacattgtgacatattgctgggccctgcactgataatttgtgactcttctgcctgtgatttgcccacttggggcattgtgacatattgctgggtttaacactcaggtgatgtaacttttatgcctaggccttgcttacaggaggcattttgaaatgtctttgtggctgggcatggtggctcatgtctgtaatcccagcgcttggggaggccaaggtgggcagatcacaaagtcaggagttcgagaccagcctggtcaacatggtgaaaacctgtctctactaaaacaaaacaaaacaaaacaaaacaaaacaaaacaaaacaaaacaaaacaaataaaaccacaaaaatcagccaggtgtggtgattggtgcctgtagttgcagctactcaggaggctgaggcaggataatcgcttaagtccaggaggtggaggttgcagtgagctgagattgcaccactgcactccatcctgggcaacagagtgagactccatctccaaaaaaaataaaataaaataaaataaaaatacaaatgtctttgcaccaatcctacaggtgatgtgactctcttgtgttacctggtctctgcccccaggaagaattgtgacctttcacagcgtatagctaatttttttcttttatttcttagtttttctcctgcaggaaagattgtgaaatattactgaactaagcaccaaagggatatattttttttcttggacctgcccatgtaagaccttgtgacatattgctgggccctacacctagatgatgtgagttttctgcccgtcaactattttatgtgactctcctctcttatcttcactttgtccataggttagcttttaatatacctttgggcctgggtcatgctaatagaagcaagagtgacttattgttgggcccagcacacaggggatgtgattcttctgcttggttcctgccgaaatggtcattgtgacatatctatgggtcagttggctaaatgacaggactctttttatctttctggagcagtccacagtaggaaatttgacatatcgctgggcccagcacatatctgatgtgactctcctctcatgccaaggccttgcctactgtagtgattgtgccatatagctgggcccagctcctacgttatctgactcctgttttcttcctgagccctatgaaaagattgcattattaaatatttctgggtcttttacctaggtgatgtgacttttctttctggcttgtcctctcagagggtattgtgacatgttgctgaatgcagcatttaggtgatacgacccttcctctactgcttggactctgaccaaaaagggattgtgatgcatcactgggcccagcacctacgtaatgggactcttttctcttgcctggaccctacaaatattttgcattgtgacgtgtagctgggtctgccacccaggtaatgtgagtcttccacataagccctggccacaagagtattatgaaataactttttattcatcacctaggtagtgatgtgactcttcatcagcctgtaccctgccacaagggaattgtgttgtgtcagtgggtccagcacctagatgatgtaactcatcttttggctggacctttcatattttacatgttgttacatatcactgcatctgacattaggggatgagaggcttctgcctgggccctgcccacagatggcctcgtgacatattttggcatccatcacctaagaaacgtggctctcctcacctacatgcaccatgcacaaagaaaatattgtggcatatcactgggatcagccaccaggtatgtgtctatcctctcagggtgttgctcacagagagcgttgtaacatatcactgggcccagcacacaggtgatgtgacttgtggcctgtgcctatctagcctttttttttttttgaggcagagtctcactctgttgcccaggttggagtgcagcgatgtgatcttggctcactgcaaaatctgcctcctgggttcaagcagttctcctgccttagcctcccaagtagctgggattacaggcatgcattaccacaccgttctaatttttgtatttttagtagaggtggagtttcaccatgttggccaggctggtttctaactcctgacctcaggtgatccacttgccttggcctcccaaagtgctgggactaccagcatgagccactgcacccagtctacctgcagccatcttataggattagattttaatccatccccagccaagaacctagatgatgtgatatgactctcctgtctggtccttgccttcaaaaaagattgtgacatacctttagatgagacccaggtgatgtcactcttctgctcacttcctacccaccagtgtcattgggacatatatcttgcttcagcttgcaattgctatgatgattcttataccttgaaccaggcaataaaagagttatagtctctcctagctaggcttaggaaaacaaacataatccttagtctcctctttttgccaaggtcatagagaattaacactctctcaaatattctataaagccctcgggtggcacagagagtgtcatcaagggacaaaaacactgatgatattgcgtttcttttcttttctttcttggagatggagtctcactttgtcacccaggctaaagtgcagtggcatgatctcagctcactgtaacctctgcctcctgagttcaagtgattctcctgcctcagcctcccgagtagctgggactacagatgtgtgccaccaagcccagctaattttgtatttttattacagatgagttttcaccatgttggccaggctggtcttgaactcctgacctcaggtgatctgcccaccttggcctcccaaaatgctgggattataggtgtgagccactgctcccagcccaagattgtgtttcttaaaagaacatcctggccaggctcaagcctgtaatcccagcactttgggaggccgaggcaggtggatcacgaggtcaggagttcaagaccagcctggccaacatggtgaaaccccatctctactaaaaatataagaactctccaggcgtggtggcgggtgtctaatcccagctactcaggaggctgaggcaggagaattgcttgaacccaggaggcagaggttgcagtgagccaagatcacgccactgccgttcagccttggtgacagagtgagactccatctcaaaaaaaaaaaaaaaaaaaaaaagaatattctgccaggtgtggtggctcacacctgtaatctcagcactttgggaggccggctcacgcctgtaatctcagcactttgggaggccgaggtgggcggatcacaaggttaggagattgagaccatcctgactaacatggtaaaaccccatctctactaaaaatacaaaaaattagccagatgtggtggcacatgcctgtagtcccagctactcaggaggctgaggcaggagaatcacttgaacccaggaggccactacactccagcctgggcagcagagtgagactttgtctcaaaaggaaaaagaaataaaaacatcctgccgctcattacaattgtaacctcaaaatagagcccactggtgaggtcctgaatctcatatgcagatgcagtccacagttggaattgtgactgtgatatgcaaacatcgagccaggaatgtctcatttctaaagctacaaatgatgactcacttctaaatgtagttcataggcagatgaggactctcctatattgatcagccaattggagagatgttgactctcatttctgggattagagcagcatgtactatcaagggtccataccatcacaaatgtcttagagtggattgcgactcacatgcatattgcataaagtcctcaggtaatgcattgaatgcccttacatggcccagcacacaggtgacattgtgatgctggttttcacaaccagtcaacagtaaatatgtcatccttttagaaaaacacaacctacttctgaagttctgaatctcaaccctggaggcagtgggaagttgcaaagttgactcccatgtgtggatctgctccacagctgggctggtgactcagaccaagattcagtgcacctgtgaggctatgattttactgagaagacagagtctaaaggagagattgaggctctttttcatgaattcatccatattgagattgtgatttctgcacttagacccaacctccaaatggtcttgcctctcatacctagaatgggaatatgtgaggaattattcatgttattcctgagcctttctgcatgtgtgattgtgacacacatctctgctcaaaacctgaggaatttgactctcctgcctgggcctggcacacagatgggattgggacatattgtttgaagcagtatttagatgatgtgaccctatactctttccttgttcctgtcacagagtacattgtgacatatcactggtccctgcacccaggtaatttgtttgtcttttttatgccctgcccacatgggctattgtaacatattgctgggtctaacacccaggtaatatgaatctcctacctatatcctgactacaggggccaattttgccatatttctgaacccgtcatctatttgatgttactctccactttttttttcttggttttaaggagtggagagtttaataggcaagaaggaagggagaagacagaaagaagaagctcccctatgcagagacagagggaggggagctccaaagccaaaagagaaggccccctactctcgacttttacataggcttttccctaagagacattgtaacatatctgggccaagcacctacgtgatgttactctttgctccttcctgggccctgaccaagaagggggagtgactaatccctaggcacagcacacaggtgatgtaatatttctgcctgttccctgtccacaggagacatagtgaatgtccctggcctactaaacaagatgatatgactattttttgtctctgagacctgtcaacagtggggattgtgacagatcacttgtctcagcacctacataatttttccccatgcctgggtgcttcccactggggtgattgtggcgtataactaggtgaagggcctaggttatgcgacttttctcttctacgtgagcctcacccacatagggcattttgacatacctctgaagctctaatttaggtagactgctgcatggacccttcatttttcaggaagtattgtgccatatttttttgacctagctataatgcttctaatgccactgcactccagcctgggtgacagagtgagactacatctcttctaatgcttgggctctgcccaaggagggattgtgatgtattgctgggcccagcaccttggtgatgtgactctcctctgcttctacagggttcaggacggaaaggagagttacatcacttaggtgatgaacaaaatgatatgtcataattcccctattagcagggctcatgcaggagagtcacatcacctaggtgttggactcagccatatttcaatatgcaaattgtatattgtgtttattaaaaattgtatatattgaaatatggctgggtccaacaggtagatggtgtgattctcctgcttgagcccttctaatagggaaattatgacataatcattttgtttataacctaagtgatgtaactgtccttttctacttgagctctgtataaaggggggattgtgacatatcactggacccagcatctggtggtaccagtctctttctgtttttctttttcattttttttttttcttctgagatgtagtctcgctctgtcacccaggctggagtgcagtggcatgatctcggctcactgcaacagccacctcctgggttcaagcaattctcctgcctcagcctcccgagtagctggggttagaggcatgcaccaccacacctggctaatttttgtatttttcgtagagatggggtttcgccatgttggccaggctggtctcgaactcctgacctcaagcgatctacctgcctccgcctcccaaagtgctgatattacaggtgtgagccactgtgccacgccttattaccctcctcatcagccctgtgtattttgggtattaagacatatttctgggtcaaaccaaatgggtgaaaggctcttgcctgggccctgcccacaagaggccttgtgacacatctctgcatccactgctttggaggtgtgactctcctcttccatctgcaccatgaccacacagaaaattgtgacatacctctgggttcagcaaccaggtgtgtacccaggtcttacctgcagagaaaactgtgacatataacttggcccagtatccaagtaatgtgactttgttgtctgtgccttgctttcaggagagaattgtaacataaccctggtcaggcaaccaggtgatatgactctctgtctgatccctaccctggaaaaattgtgacatatttctgacccagcacccaggtgatgttactctcctgttttctttctactcacagtttgggttgtgacatataccttagccaagctcacagttgtggtgatgacactaataccacaaaccagccaaaaggagagttactggcacttgtaactatacttggagaaatgggtaaattcctgggtcttctctagataatgtcataaaggattacttttctttcacattttatataaagtctttggatggtacagagagtgtcatcacaagaccaagcacacaggtgagactgtgtttctcatatgcacaacctaccaaatgttagcattgtcaccctgacccatggacagtgcccactggagagatcctgaatttcacaggtgcatgcagtccacagtaaaaattctgttacatgtgatcatgccactacagttaacatggtgactaatttcaaaatccagctcataggcaggtgaagagtctcttcttgggacccagccatttggagagatgttgactcaaatacatggacttaggttcacaggtatgattatgaatccataccaggaagaaagtttcagagaaaattgtgactttcatgaatactgtataaagacctcagatggtacagagagttttataatgaggcccagaacacaggtgacattgtgacacatgcacacccagccgacagtaaagattgtcatctttccacatgaatacagctcactgttgaagttctgattctcatatttggaggtagccaaaagctggaaaattgactctcatacatggatttgggctatatgtgggttgatgactctcagaccaagattcaacataccgctgaggctgtgactccactaaggggacacagtccacagcatagattgaggctcttatgcatgtattcagtccacctttgagattgtaactgatgtactcagactcaacatacaaaaagtgttgactctaatacctagaaatgggacatgtgcaggattgttaattttatccctacattttcctgcaactgtattgcaacatacacctctgaccagcacctgagtaatttgattctcctccctggtgcccagcccacagattagatcatgacacatcactagacccaacacctaggtggtgtgactacatttgcctcagcactgcccacagggaggcattgagacatatggctgagccccacaccttggttatgtgactctcattcctgtgccctgccattatgggtcattgtgacatattgctatgtgcagcatccaggtgatgtaactctctttgctgggttctgcctaaaggaagcattacaacctatctctgtaccaatcaccaaggtaatgtgactctcttattctaccaggtccctgcacacataaataattttttctattactgggcccagcatcgagctgaagtgactcttctcttctaagtaggttctgctctcaatgtagattgtgacatactgctgggctaaacaaggtgatgtgagccttctgtccaaaccctgcccatagcaagcacagtgacatatctgtgaatccatcatctttgtgctgtgactcttacttgggtttggcctataggagagattgtgacatatctctgggaccagcacttagatgatgtgactattctttcttcccatggccatgcttccatgaaagagcgtgacttatccctgggataagcacacaggctacgtcattcttctatctggcccctgtccacagggattattgtggcatatctctgggcccattacctagatgatgtgactctactcttctttctggggcctgtccacagtgaggattgtgatgtatcacttggcccagcacttatgtgatgtgactcttctcatgctttggctctgcccactggagtgattgtgatatgtagctgggtccagctcttaggttatgcaatctatcttttctctgtgagccctacccacagggggcattgtgacatatctctgagcctctcacttagatgatgtgaattttctgctagggctgttttcccagagggtattgtgacatttctgggcccagaacctaaatgatgtgactcttctatggcttgggctctgcccaaaatatgactcatttttgtgactgatctctgcatacatgtattgtgatgtatggctggaaccagcacctgcataatatgagtcttctgcatggactcttttcaggagggtattatgaaatatcattttgtttatcacttaggtgttgtgactctcttcttatgactggaacctgccacaaagggcaattgcaacatatcacttgacccagcacctaagtgatgtgattctctttttttgggggagggggtctcacatattttgagtattgctgggcccaacacctagggaacagactgctcctttcttgaccctgcccatgggggctttgtgacatatctctatcaggggaaccagcacccaatatttcaatgtaggttcttttctgttttccctaagtgttggccagtctgagaaataaagagaaagagtacaaaagaaataaattttacagctgggtctccggggtgacatcacatgtcagcaggttccacgatgcccccgagccgcaaaaccagcaagtttttattagcgattttcgaaggggagggagtgtacgaatagggtgtgggtcacagagatcacatgcttcaaaggcgataaaatatcacaaggcaaatgggggcagagcaagatcacaaggccagggtgaaattagaattactaatgaggttccatgtcccgctgtgcatgcattgtcattgataaacatcttaacaggaaacagagttcaaaagcagagaactggtctgactagaattcaccaggctgtaatttcctaatcctagcaagcctgggggcgctgcaggagaccagggtgtattttatcccttatcttcaactgcataagacagacactcccagagtggttattttagaggcctcaccctgggagtgcattattttgccaggcctgttccttgctgagaaaaagaattcagtgatatttctcctattcacttttgcaaaaagagaagtatgactctgttctgcccagccctacaggcagtcagggttatctcccttgttccctgaaaatcactgttattgtgttcttttaggatgcccagagttcatattgttcaaacacacatgttttacaaacaatttgtacagataatgcaatcatcacagggtcttgaggtgacatacgtcctcagtttatgaagatgacaggattaagagattaaagacaggcataggaaattataagaatattgattggggaagtgataagtgtccatgaaatcttcacaatttctgttcagagattgcagtaaagacaggcacaagaaattataaaagtatgaatttggggaactaataaatgtccatgaaatcttcacaatttatattctgctgcggcttcagccagtccctccgtttggggtccctgacttcctgcaacatatctctgcatccatgacctaaatatgtgactcctctattctggctgcacccagcttacaggaagattatgacattttgctaagtaaagtgtatcttgtgctgatctcctatgttattctgtgactaagaatgcctaacctggggttgcagcccagtaggtctcagcctcgtttcacctcaacactattcaagatggagtcgctctggtttgaatgcctctgacatagagatccattgtaaaattatgaaaaaaatttatttgaattgcagtgaataagaaatggaagacctaggatgggctattctgaaagatttagcaatatttgtatttgtcaaaatttaagttttccgttaatacttctgaatagatacattgttttattctgtcaagtttaaatagatacgcttgataatacaaggagttcccactgtgaaagaaaaataaatctcctgatgccaaaattactaatccaatagaaaagtcaagctggagactacatcaggcaaacctgtttcctattttattcttaaataagatagctacacagataaaaagctacatacctacctcacaatttgctcagaaggaaattcctagtgaatagatgacagacagaactcaaagttatctctctgaggctcacctgagacaaatgcagatctgtttgtttcctctgccctattgttaattttaaaatgcagattcactgagccaggctaaattgtgtattcagtgggagacttatcaaggactcaaataaatttattattttttctcttatctacttatgacttggaagccccaacctcaagttttcctgtcttacctgaccacaccaatgtacatcttaaacatgttattgatgtctcttgactttctaaaatgtattagaagactgtaccccaaccaccttgggcacctgtcatcaggacctcctgaggctgtgtcacaggctcctacttaaccttggcagaataaactttccaaatttattgacacttgtctcaggtaccttttgttttacacagccaaggcactgctagctggtcactactgcaccccagacttatccaccaccattgcagggactctggtttcttgatagcaattgtttcacttcaatggaagatggacaggtgtgtacctgagaatgcagcactgagctcctgggtgatgtgggatgttccaagcatcagctttcagccagtctatcttataactgttgaaagttacttagtgtagtgtgaagatgggaataaacagctcctgaatgctaacaatggctgttcattatagggtgacccaaggtggccatgccatggttctgggttcttctgtggcttctcagtggctgatggagtggtttttttggtcttgtgatacagggtgtgtgtgtctaaaggagtggagggcagggtggggaaaggaggtgacaggcaggttcctggaggtcacctcctggcattattcttgtggattgccaagtttcttgtttgaatttgtttcttgttaatagtacatgtgtcctcagcaaggaggtgaaaataaaaaaaaagagcttggaacagtctcagctctgtgaggtctgcacaatttatcaagcccagagagatgagactgtggaacttcacccaggggcattttttgttgttgttgttgtttgttttgagacgaagtctcactctgtcacccaggctggagtgcagtggcatgatcttggcatgctgcaaccctgcctcttgagttcaagtgattctcctgcttcagcctcccacatagttggaattacaggcacatgccaccacacacggctgatttttgtatttttagtagagatcgggtttcaccatgttggccaggctggtctccaactgctgatctcacctgatttgcccacttcggcctcccaaagtgctgggattaggggcaattctttaaagacatttactttctgactagcagtctcacccattatttctttattaggaatttggaaaataaaagaatatatgcagccaatcaatagcttatgcatttaaatatgaattcttggtaaataacttaggaactgccttctcactttttcaaaaagactcactttcaatggctgctaattaaaatatatattcagggcaacttaaatctgtcctcctcttggctatcctcaatatctgacattgagtaaatgtatttcaggttacattttaaccttttttattattttaagttgactgagggctggcctggaacattctccttggtataaatactccaactataagctacctgctcagtagaggaaactaatcaacagcagggcctagcataggtcaaagacacaagcagtgggaagctttttggggcctggctcctaattgcaaggacagttgcacaggtgtctctgaatgcttagacagcctggcctttcctgacccaatgccccccatcagctttttcaagcacatcttgatcttttgtcattctgttctctggggtgaaaactcatcgtcagggctgtctacaacaaaacagaagtatcaggttactaaaacctcaggaacagagattacggattgggttaagagtgtgccctttcttaaggatggtacgcatggaaaagcagcaagcagtttcagaaagatacaggaaaaattgcctctaacggatatttatacttcaactcaatttattctgtaagtggtagggaaaatgggataaaataccatatgttcaagcatttttgcttctcagtcagaatgaaaccctgcagcaggcatgtccatgtttcatgagagaaatagaagaaaaagagttggacatacaagatgatccttatttcaagcccccctgccacttggttcagcgggcatttttgggtgaagcagaacctttctgtcaggtctgaaggttcagatgtgttggtcttttttcccactaatacacctgaaagttctattgagaaccatttgtccctcctccctacccttctagtcccactctgtacccaccactccctgaagaacttagcccagtgagtactactcatagtggagctgcctatcaacctccaaggggaaatctttgtccacctacagaggttgcaaatggggaagaaggcctgtgagaggaggtgtccccttttctctgtctggtttggctctataataagacaagtttggtcatttctctgaagatgcaggaaaattcataggtgagtttgagaagttaactctgacctacagtttaacatggcaggatctgtacattttgttgtctctgtgttatacagtggaagaaaaacaatgcattttggggacagctaggactcatgcagatgaggtattggcttgcaacccgaaccataatatatatcagacaggaggtatagcagttccagatcaagatctagagtggaactatcaaagggggtgtgaggacttggaagaagagatcatatggtcacttgtttgttgaaagagatgaagaaatgtatgaaaaaacctgttaacaatgaaaaggttaagcaactttctcagggcaaagatgacaatccagctttgttttaatagtgtttagttgaggcaatcagaaaatatactaacactgatcttgcctcaatgaaaagatagacccttctgggagtacattttataacccagtctgcccctgatatccatagaaaactactaaaagcagctatgggtccccaaacttctctggaacagctttggatatggcatttttagtttttaataacagggacaaagcggaggtagcggaaagaggaagaaggacctcccacaagttgcaggtcttggttgcaaccttaagctaacctcccacatggggttgccctcctgggtcttgggttgaacaagggaagctgaaaggtgggaagcctaaacctgggtgtccgagtcactgtgccttgggcataaatcaggttgcacactgtaagaaaactgaccactggaagagggtttgtccagtgttctgaagagagccatcagcacgtgaactaatgatgggtaaaacagccaggcaagcacccaagagtgacggggactgagaccttccaccacggtttccatcagacaactagccatatatctggaaaagcctcagtattttttgccatggcagttaagaatatgaagtttcaccaggtgcggtggctcacacctgtaatcctagcactttggaaggccgaggtgggtggatgacttgaggtcaggagttcaagactagtctggccaacatggtgaaaccccatctctactaaaaatacaaaaaattagccagaaattgcttgaacctgagaggcggaggttgcagtgagctgagatcgtgccactgcactccagcctgggaaacagagactccgtctcaaaaaaaaaaaaaaaaaaaggaagctagatgagttgcgagttgcctcatgcctgtaatcccagcactttgggaggctgaggtgggtggtcgggagttcgagaccagcctgagcaacaaggagaaaccccatctctagtaaaaatacaaaattagctgggcgtggtggcacatgcttgtaatcccagctactcaggaggcttaggcaagagattcacataaacccgggaggccgaagttgcagtgagctgagatcatgccactgcactccagcctgggcgacagagtgagactccttctcaaaaaaaaaaaaaaaagaatattaactttcttctggactgcttactctgttttgacccattataatgggtctgtttcacccccaaactgtatggtcacggggatagattgacaagcccatagatgccattttacataatctctaagctgtttttcagtgacttcggttttcttacataacttccttatcatgcccggatgcctcagggaagtcgtagcaatttctctttcagtagataaagccaataaactggctttagaacaacattctgaggtttaagcccacaccaagtatgaggagttctataagccaaaagacaccagtggatgacaggggacacttattgaaatagcagacattttgctagacactccaattaacctgatatgaggtgctaatcaataaaaaatagttaaacatttgcatgactctactcatttgggaataaattccctgtttaatatctcggctttttatagaaaaataattacttaaaagagtaaaccaggtaacccaggcctgtgaactatatgcctggaacaacccaaatgaccaatgtttacctcctcctttagtaaggcctgttcagcatagaggagcataccctggtgaagactggcaaatagactatactcagatgcccccgtgtaaagggtttaaatattgattagtattcattgacacctttaccgtttggattgaggcttttcctaccaagtctgaaaaggcaatcaaggtttctaaactactaaaagaaataattccgatgggtacagtatctcacgcctgtaatccctgcacattgggaggccaaggcaggtggatcacctgaggtcaggagttcgagaccagcctggctaacatggcgaaaccccgtctctactaaaaatacaaaaattagctgggtgtggtggtgtgcacctgtagtcctagctactctggaggatgaggcatgagaatcacttgaaccttggaggcagaggttgcagtgaaccaagattgtgccattgcactccagcctgggcaacaagagtgaaactctgcctcaaaagaaaaaaaaaaaaagataatatcgagtctcgcaaaatatagtaattaagaagattctttatcacaaacccttgtggcagagcacatctcctcataggtaaaaacattgtaactatggtaaatgtgttcctcaatagtaaattaattattaaacttattcaaaattattttatttaatttttcagaacaatgcttatgttttgtatagctaattgctgtaattctttaacaaaaactgggccagacacagtgggtcatgcctgtaatcccagcactttgggaggccgaggcgggcggatcacgaggtcaggagatcgagaccgtcctggctaacacggtgcaaccccatctatactaaaaaaaaaaaaaaaaaattagccaggcgtggtggcgggtgcctgtagtcccagctacttgggaggctgaggcagaagaatctcttgaacctgggaggcggaggttgcagtgagcccagatcgcgccaatgcactccagtctgggcaacagagtgagattccatctcaaaaaaacaaaaaaaaaaaacccaaaaaactatttgattgatgtctcattacaaaatgtataaaagcaagctttgccccgaccaccttgggcacatgttctcagaacctcctgagagctgtgtcacaggccattgtcactcatatatggctcagaatcaatctcttcaatttttttttaaaccatctgtgacaaacccacagcaaacattaaactgaacaggaaaaagttggaaacattttctctgagaaatggaacaagacaatagtgcccattttcatcacttctattcaacatagtacttggaagtcccagccagagcaattagagaaaagaaataagtagcgagcctccaagttggtaaagaggtagtcaaattgtcactgttcactgatgttacaatcatataattaggaaaccctaaatactcataaaaaagcatctagatctgatcaattcagtaaagttttaggatacaaaattaatgtgcacatattagtggcattggtatacaccaacagtgaccaaactgatatttaaatcaagaactcaaccccttttaaagcagctgcaaaaaaataatactaataattaggattatccctaatgaaggccatgaaagatctctacaagaaaaactgtaaaatatgtctgaaaggtatcatagatgacacatacaaataaaaacacatcccatgcttatagatgggtagggttagtattgtaaaaatcatattaccaaaagcaagctacaaattcaatacaattcctatgaaaataacatcataatttcctcacataactaaaaaactctaaaattcatatgaaacaaaaaagaacctgcatagacaaagcaagactaagcaaaacaaaaataaactcaagatggatcaaaaatgttaagacctgaaactataaaaattgtagaaggtaatactggaaaaactcttctagacattggctttggcaaagcgtagatgaccaagaacccaaaagcacatgcaacatgaaacaaagacagatgagacttaattaattctcaaaagaagatatacaaatggccaactaacgtagataaaaatgctcaacattactaatgattaatgatcaggaaaatgcaaatcaaaaccacaatgtgataccaccttattcctgcaaaaatgaccataattaaaacatcaaaaataatgcatgttcgcatggttttggtgaaaagggaatacttttacattgctggtgggaatgtatactagtacaacactatggaaaacagtatggagattcattaaaaaattaaaagtagaactaccgtttgattcagcaattccactactgggtatctacatggtgaaaaataagtcattatatgagtaagatacttgcacatgcatgtttatagcagcacaatttgcaattgcaaaagaatggaagcagcctaattaatgcccatcaactaatgagtggaaaaggaaaatgtggcatataccacattttctttatatatatataatatatataaataatatataatatatttataataatatatatacaccaatgaatgctactcaatcataacaaggaataaaataatagcacttgcagcaacctcaatggagttgaagaacattattctaagtgaagtaactaaaaaatgaaaaaaacaaatattgtatgttctcacttataagtgggaactaagctatgagaatgcaatggcataagaattatataatggactgtgggtactcagtggcaagggtaggagaagagtgacggataaaagactacatattgggtacagtgcacactgcttgggagatgggtgctcctaaatattagaaatcactacaaaagaacttatccatgtatccaaacatcttctgtaccttaaaaactttggaaataataataataataataaacaaaaaataatcccaaaccccgtaagtttaactttctatgctttggctgtttttggtttattttttattttttagaaagggtctcactctgtcacccagaatagagtgcagtggcttaatcagggctcattgcagcctcgacctccttggttcaggcaatcctcctccctccgcctcctgaacagctggtactaaaggtacaggccaccatgctcagttaacttttgtatttttttagatacatgtttttgccatgttgcccaggctgatctcaaattcctgggcttaagcagtcttcatttcttggcctcccaaagtgctgggattataaacatgagccatcatgagtgaccacaatcttttttttttttttttttgagacagagcctcactctgtcacccaggctggagtgcagtgacctgatcttggctcacttcaacctcctcctgtcaggttcaagcgattctcctgcctcagcctctgagtagctgggactacaggcacgcgccaccacgcccagctaatttttgtatttaatagtggagatgggggtttcaccatattggccaggctggtcttgaactcctgacctcgtgatccacccacctcggcctcccaaagtgctgggactacaggcgtgagccactgcacccagcccagaattttttttaacatgatatagaaaagctaactatatttagatctgttacttaacagaaaatttgaataaacgtcttttattaaaaaacataaaattttttatctacaaatattgatacaaaacagttcaaaattacttcctaggggtttcactaaaaattagtttgttaagggtatatatatatatatataaaaactaagatttctaggtgtaaaacaatttttttatagagagtgtataaacaaaggccaggcgcagtgggtcacgtctgtaatcccaacacccaacactttgggaggccaaggcaggtggatcatttcgagcttaggagtttgagaccagcctgaacagcaaggcaaattccagtccctacttaaaatacagaaataaaccgggcatgatggcttacacctgtagtcccagctactccagaggctgaggctggagaatcgcttgaacttgggaggcggaggttgcagtgagccaagattgcgccactgcacttcagcctgggcgaaagagcaagcctctcctggaaataaaaaaacagtgtataaacaaaagcaaaatatgcttttgatgaagaaagttagaaacattttgtctactttgaaattatttaaaggttgtttcaaattgaaaatataaaaataatgtagattaaaatacaacataaaaatttaaaaaatggccaggcacgatggctcacgcctgtaatcccagtaatttgggaggctgaggcgggtggattacctgaggccaagagttcgtgaccagcctggcaacatagtgaaaccccgtctctactaaaaatgcaaaaaattagccaggtttggtgatgcacgcctgtaatcccagctactcgggaggctgaggcaggagaatcgcttgaacccaggaggcagaggttgcagttagccaagatggcgccactgtactccagcttgggcgacagagctagacttcgtctagacaaaaaataaaaaataaaaaaaagtataagagatcataaaatatgtataaaaatctagaatggtcaaaaagacaaatttgatggactttatttttgttattttattttattttttgagacaaagtctcgctctgtcgcccaggctagggtgcagtggcaggatcttgactcactgcaacctcagccccccgggttcaaggaattctgctgcctcagccacccgagaagctggggttataggcgtgcgccaccatgcccagctaatttttttttcttttatttttttgagacggaattttactcttgttgtccaggctggagtgtaatgacgcgatccacgctcactgcagcctccacctcccaggttcaagcagttctcctgcctcagcctcccgagaagctggtattacaggcacgtgccactacgcccagctaattttgtatttttagtagagatgaggtttcaccatgatagtcaggctggtctccaacacatgacctaatgtgatccgcccgccttggccatcgaaagtgctgggattacaggcgtgagccaccgcgcccagctgatggatttacttataacggtttatcaaattagctttagtgctgataatacattattactaaagtaaaagttgattttctcttgaacaaaaattatatgtattattaatatacataaaatatgtttgttcacattttgaatacattgaaaaagagagagagcaaaaaagatatagaattttcccatgctctggggtgggcctggctcagctcagggaggaagccctgcccgataaggctgcagcttaggctgtcactctttcttcagcctagggtgtgatcacatcttctatcactcagggtctgagtaggcggggccttaaacgttatccaactagggacgttgggctgggaactgtccaatcaggcacacagctggactggacaaagcggcttccgggatatggcggggcctttgtctctcgctgtcgccggagtcccaggtctgtcttcactgctctgtgtcctctgctcctagaggcccagcctctgtggcgctgttaccagcaggtattggagatccacagctaagatgccaggaccccctagaagcctagaaatggtgagaatgccagtccgacatcccgagagaggggagggggctggttggaactggtgggaagcggctgtggcgggactcaggcctccccccagtcagctccacaatctgcgcccagctcgacctcagtccccttcagaaataagatggcggctgcgctgacagccagacccccaggagtcctgtttcttccctgcgcagtgactgtgccctgtcctggagccctctctgggcagctgtggacccgcagccccgcgtctctcccagattgttcagggacccggggagggtcgtcaggggagaatcctgactcgggttgcgggttcatgaacgggaagagctttggtctgtggggttcccaggccctcttttttcccattaaaaatttatgggcgtcactgcaaaaatattaaatactttaataaaagaatgattcaaaaattgtaccacacccagctgtggtttgtacttttgtggtccatggaaggggcctgaagaaaagattgttacaaggttcatgataaagaaaaccaaattcaataattggctaggtacagcaatctaggttgtcgttttttttttttttttttcttttttttgagacagagtctcacttttttgctcaggctggagtgcagtggtgtgatctcgactcactgcaacctccgcctcttgggttcaagcgattctcctgcctcagcctccctagtagctgggactacaggcgcccgccaccacaatttttttatttttagtagagacggggttttaccatgttggccaggctggtctccaactcctgacctcaggtgatccacccaccttggcctccgaaagtgctaggattacaggcgtgagccaccgtgcccagcctcgtttcttaatttttacatttaaggtgggaatatcctggttatgtaatcagagcttaattgtcagcttattcttggttaagcaagaattttgtttccgctaatgtagtaatttaccaaaaaatgctcttgagtttagattttttttttagaagtagaaatccggggactagagccacctcaatctaattgcctgccacttaattattttcacactccacaggggactgcttttttcctgaaattttcacatgtatcccaagcagggcctcaagtccacccctcatcccctattcctccagcctaactctggcttgcaggaaaatactaaatttcccgttttgtctgacattcccaaatgccaatgtcccctccctaattcactttatcatctatttgtcctttagggtagattttgatacctgttttaatttttatttatttatttattttaatttttgagacagaggcttgctcggtcaccccggatggagtgcagtggtgcagtggtgtgatttaggctcactgcaacctctgccttatgggatcaaatgattctcttgtctcagtcgcccaagtagctggaattataggcgcccgcccccacgcctggctaatttttgtatttttagtagagaccgggcttcactatgttgtccaggctggtttcaaactcctagcctcaagcgatccgcctgcatcagcctccccaagagctggtattacagacgtgagccatctcgcctggccaattaatctttttttttttttttttttttttttttttgagacagagtttcactcttgttgcccaggctggagtgcaatggcacgatctcggctcaccgcaacctccgcctcccaggtttaagcgattctcctgcctcagcctccctagtaactgggattataggcatgtgccaccatgcctggctaattttgtgtttttagtaaagacagggtttctccatgttggtcaggctggtctcaaactcccgacctcgggtgatacgcccgccttggcctccgaaagtgctgggattacaggcgtgagccactgcacccggccaattaatcattttttgacaaagcatttgatggcacatttaaaaaggtttgttttctttttgtaaatatttcctatgagaagaaagcaaagaataatctcctgacactgtattgtaaaatatctctgcgtttttttttcttctatcttccctagtcacagatatcttatcagaatgtttttgggtcaagttttccttttggaaactatagtgtgatgtgtcttcagtcaccattcggttttcttggacctgggtttcagtactgtattgggataaacgaagatacccaccatggctatgtctgcttagagtgtctagtaaatatcagcttctgggtcatattctctcataggaaaatctgaggtattgagtgtagcgtcccaagtgcgcaggtggatgccctgagtctaaaaggcatttcctagtgcacttttttttttaaagctaattttatgagacattaatattgtcttcacccaacccagctttcatttcttaaagacacattgctggtcagtcaatcagataccagtattgaggagaaaacaaataatttctgcctcctggtttcctttagagaacagaaaaatagtaaaaaatttctagaaaacaaaacaaaacaaaacaaaaacgagggccaggcatggtggctcatgcctgtaatccctacactttgggaggccaaggagggtggatcacgaagtcaggagttcgagaccagctggccaacatggtgaaaccccatctctactaaaaatacgaaaaaaaaaaaaaaaaagctgggtgtagtggtacaggcctgtaatcgcagctactcaggaggctaaggcaggagaatcagttgaacctcagaggcggaggttgcagtgagtggatatcacgccactgcactccagcctgggcgacagagtgagactccatttcaaaaacaaaaacaaaccgcaaaaaactgaccccagtgagatggtgtaagaacttgcagagtaaaatgcgcctgagacactcactggggcatagttcagagtctcctgagagggggttattgagcactttagtgagtaggatggggtgggacagtctctcaagtaattggatggcctgacttgacacatgattaagacatatctgtgtcttgaaaaggttttttcacttattttgacctaaggcttgttttcgttgtcttgagacagtttccctctgtcacccaggctggagcgcagtggtaccatctcggtccactgcaacctccagatcttgagttcaggtgattctcatgcctcagcctcccaagtagctgggactacaggtgtgcaccaccacactcagctagtttctgtagttttagtagagacagagtttcaccatgttagctaggctgttctcaaacttctggcctcaagtgactcacctgcctgagccttccaaagtgctgagattacaggcgtgagccattgtgcccagctcacctcggttttttaactgtgtattgcattttattagtagagcttgaaaggtaagaaaatatttgcaaagggcataaaagaggtgagtttcaaaaacattaatatctaataatatattttatttgttgaacattttcatttacctttttctttctcagagtgagtttaggaagtttctcggacatgtttttttttatggaggagtgatttttttttttttttttttttttgagacagagtctcactctgtcgcccaggctggagtgcagtggcgccactttggctcactgcaacttctgcctcccgggttcgagcaattctcctgcctcagcctcctgcgtagctgggatttcaggcacacaccaccacacctagctaatttttgtatttttagtagagacagggtttcaccatgttaggctggtcttgaactcctgacctcgggtgatccgcccgcctgggcctcccaaagtgctgggattacaggcatcaaccaccgtgcttggcctatggctgagtgatttcaaacagaattccatctagcttttagaatggtagctaccaaggaaaaaaataaagaaaaaaaaaaaaaaatctctcttcaatttcagctgtagacaatgaatacatttccacaaaacaatgtgatagataattgatgagttaaatagattcctgaaaacttcaattcctttttttagcagggtaaatccttggtagtgaacatctttgttctatatcctgtgtttttttgtgtgtttgattgttttttgagataaagagttgcactgcgacacccaggctggagtgcaatggtgcaatcttagctcactgcaacctccaattcccaggttcaagtgattctccttcctcagcctccggagtagctgagactgcaggcctgtgccaccacacctggctagtttttgtatttttagtagagatggggtttcaccatgttggccaggctggtctcgaactcctgacctcaagtgatctgcccacctcagcctcccatagtgctgggattacaggtgtgagccactgcgcccagccctatatcctgttattttgatttttgagtttaatgctaaattttatgtgatgaaacttggtacctcctagaagtgttcctatgtgattaattttttttttttttttgagatggagtctcgctctgttggccaagctggagtgcagaggcgcaatctcagctcactgcaagctctgtctcccgggttcacgccgttctcagcctctcgagcagctggaactacaggtgcccgctaccacgcccagctaattttttgtatttttagtagaaacaggatttcaccatgttggccaggatggtctcgatctcttgacctcgtgatccacccacctcggcctcccaaagtgctgggattacaggcatgagccactgtgcctggccttttttttttttttaaatggaattttgatgttgttgccctgagtggagtgcagtgggcgatctcggctcacctcaacctacacctcctgggttcaagcaattctcctgcttcagcctctcgaatagctgggattacaggcacccaccaccaccatgcccagctaatttttgtatttttagtagagatggggttttatcatgttggccaggctggtcttgaactcctgacctcaggtgatccaccctcccccccggcctcccaaagtgctgggattacaggtgtgagccatcacgctgggccaagcaatcctcttgtacctcagccttccacgtacctgggactacaggcatgcaccaccatacctaggtaatttttgtttttgtatttttttagagatgggatttttccatgttgctcaggctggtctcaaactcctgagctcaggcaatccacctgccttggcctctcagagtgctgggattacaggcatgagccattgtgcctgatcataccatattttctttattcagtctaccattgataggcattcaagtcgattccatgtctttgctattgtgaatagtgctgtagtgaacacccttgtgcatgtgtgtttatgacagaataatttatatttctttgggtatatacccaattattaggttgcttgatgaaatggtaattctgtttttagttctgtgagaaattgccacactgctttttacaatggttgaattaatgtacactttaacagcagtgtataagcgttcccttttctctgcaaccttgacatcatctatttttttgctttttaatagccgttctcactggcatgagattgtatctcgtggtttttctttgcatttctccaataattattgataggcattttattatatgtgtgttagccacatgtttgtcttcttttgaaaagcatctttttcaagttttttgtctgctttttagtgaggtcttttttttcttgtaaacttaagatttttatgaattctggacattagacctttgttagaagcatagtttgcaaatatttcctattattctgttggttctctgttttctgtgttgatagtttcctttgctgtgaagaagctctttagtttaattaggtccaatttgtcaatttttggtttttttgcagttgctttttgtatcttcaattatgaattctctgctagattctatgtctagaatgacatttcctaagttatcttccagggttttttataatgttaaaataaacatttcagtctttaatcttgagttgatttttgtatatggtgtaataaaggggtccagtttcaatcttctacatagtgcttgctagttattccaccaccatttattacatagggaattggttccacatttctattgtcacctttgttaaagatcagatggttgtaggtgagtgacattatttctggactgtctattctgttgcattggtctatgagtttgtttttgtaccagttccatgttgctttgtttactgcagctctgtagtataatttgaagacaggtaatgtaatgccttcagctttgctgtttttgcttgtgattaccttggctattcagactctttggttttatatgaattttacaataatttttttttttagttcttttaaaaatattttggtcatttgattagaatagcattaaatctgtaaattttggggggcagtatgatcatttttaggatattgatcttttctatttatgagcataaagttgttttccatttgtgccatttctgacttctttaagcattgttttgcaattcttatagagatctttcaccttcctggtattcgtagatattttattctttttgtggcagttgtgaagggattgtgtttatgattcgtatttggcttggatgttgttgatttacagggacgctactaatttttgtacacttactttgtatcctgaaatgatactgcagttgtttgtaagttaaagagcttttctatgaagactatatggttttccagatggagaattatgttgtctgcaaacagggatagtttgacttcctctcttcctgtttaaatgccttttatttatttttatttttatttttttgagatggagtcttgctcttcgcccaggctggagtgaagtggcagtcttggctcaccgcaaactccacctcccaggttcaagtgattctcttgcctcagcctcctgagtagctgggattacaggcatccgccactgcgcctggttaatttttgtatttttagtagaggtggggtttcaccatgttggccaggctggtctcgaacttctgatctcgtgagccacccaccttggcctcccaaagtgctgggattacaggcgtgagtcaccttacctggccaaatgccttttatttttatcttttgcctaattactctgacaagtacttccaattttatgttgaatagtagtgttgagagaaggcatctttgccttgtgccagtttccaaagaagaatgcttcgggttttttttttcttttctttttgagatagagtctcactttgtctcccaggctggagtgcagtggcacaatctcggcgctctgcagcctccaccttctgggttcaagtgattctctttgctcagcctctcaagtagctgggattacaggcacctgccatcacacctggctaatttttatatttttagtggagacagggttttgccatgttagccaggttgatctcaaaatcctgacctcaggggatccacctgccttggcctcccaagttgctggaattacaggcatgagccactgcacccgtccacttccaggttttgtccattcagtatgttggctgatggtttgtcatatagataacttattattttaaagtatgtaccttcaatggctaggttgttgagggtttttaacatgaaagatgttaaattttatcaaaagctttttctgcatctattgtggtaatcttgtggtttctgtctagttttgtttatatgatgaatcacatttattgatttgtgtatgttgaaccaaccttacattcccagaataaattctacttgatcatactgggttagctttttgatatgctgctggatttggtttgtcagtattttgttgaagatttttgcatcaatgttcaaaggtattggcctgaatttttttttgtttgttttatctttgccaggttttggtatcagaatagtgctgttcttatataatgagttgaaaacaagttactttttcttaattgcttaaaatagtttctgtagaaataataatcagcacttttttgtacatctgatagaattcagctgtgaatctgtctggtccttggctttgtttggttggtaggctatttattactaattcaatttttgagcttcttattcatctatttaggggtttcatttcttttttgttaattcttggaaggatgtatttgttcaatacctttttcattttttctagattgtcttgtttgtgtgcacagaggtgttcatagtacatttcaagatatttttgtggggtcagtggtaatgtctcttttgttatttctaattgtgtttatttgggtccttcttccttatctagttagtggtttatttattttttcatagatttaattcctggattttttgatattttgtaaagtttttatgtctaaatctcagtttagttctgattttggttatttcttgtctgctgctagcttagggattgattttctcttgcttctttcattcttttattgattatatcaggttgtaaaatgaagatctttctaactttttaatttgagcattaaatgctataaatttccctttaacattatcttagctatattgcagagattctgatgtgttgttttttagttcttttttttttttttttttaagatggagttttactcttgttgtccaggctgaatgcaatggcacagtctcaactcacagcaacctccgcctcttgggttcaagcattctccttcctcagcctttcaagtagttgggattacaggcatgtgccaccatgcctgcctaatttttgtaattttagtagagacaggatttcaccatgttggccaggctggtctcaaactcctgacctcatgtgatctgcctgcctcagcctcccaaagtgctgggattacaggtatgagccaccatgcctggcctgttttttttgttcttatttgtttaaaataacttcttggtttctgccttaatttcattatttaccaaaaagttattcaagtgcaggttgtttaatttttatgtaattgtatcagttgttttatttttattgaactatatttctgttcagctgtggtctatgtgtttgttctgtataattttgagttttttgaatttgctgaggattattctatttctgattgtgtggtcagtttttgagtatgtgccacatggtgatgagaacaatgtatgttatgttatttttagatgaagacttctgtagatgtctattaggactatttggtcaagtgtagactttaggtcctaatgttttgttaattggcttcttcagttatctgtttgttagtgcctgtgggatgttgtagtctcccactgttattgtgtcataatttaaaactcttatagatctctaagaacttgctttattcatgtgaacccatgaattttatacaacacctttctctcttctgctttttctcccataagcattcttacgtgtgcacacagtgtgcaaaattcagatgtccaagagttcaagcacatgtgatggacctgtctgttgtaaaacaaaatataaattaaaaataagaggcttggtccacattaagataagagaaaatatcttactaaaatctcttttcttaaaacatttagattgtgtgtagatttttatccctgtttttttgagatatatgtaaatcatattaacagcaaaataaaacttttgtcattttttttgactcaggattgtctttatctgggacctgagattaattgctctttttttgctttggcaagagattattcttatgatagtcttttaaagttgacacagatttgttcagagtaaagctcattccaagagcacacaaaagttgagcataaaaatagacaaaatttagcagtacagaattataaagattaaaagatactgagtaagttgtttgacagaaacctgattatccatggtgatcgtttgcaggctgaattataaagattaaaagatactgagtaagttgtttgacagaaacctgattatccatggtgatcgtttgcaggctgaagtatttatactacaaaaacaaaaagagttcagtttatggccggacgtggtggctcatgcctgtaatcccaggattttgggaggttgaggtgggcagatcacctgaggttgggagttcgagaccatcctgaccaacatggagaaaccccatctctattaaaaatacaaaattagaagggtgtggtggtgcatgcctgtaatcccaggtatttgggaggctgaggcaggatagttgcttgaacctgggaggcggaggttgtggtaagctgagatcatgtcattgcactccaccctgggcaacaaaagcaaaactctatctcaaaaataaaataaaataaaataaaataaaataaaataaaataaaatatacaagcaaacaacaacaaaaaaaacaattcagtttataaactgaaccagtggagtctgttgtcataccttggtttctatttattacttcagtacaattagcatagttatgcagtgtttgtagacaacctcattcaaacacattcactagtattttctacaatagtatgaataaagccataatatttactttaaatgaattccttaaatagctattttaatattgtgattcatacttttgaaatgtagtttttgagctgaattataaagaaaatgtttaaaaattccacatacattatgagtagtacattaaaattattcatacttacatatttatgtctaatatccaaagaaaatttactaccaaattgttacagtagatgttagtctgataggcttattaatttaaccaatagggataattataagtaagcataatgttagtgtctttcatttcacaaattggaatgctgctattacaggacaaataaaggcaagtgatgtggccatcccaaaactgtaatacctctctagtaagctatgttgtaggctcgcatatattccattatattatcacagtcatattttaattttttatcaaaggtactggtgtaagttgtcaaatatatttcaatatagattttgccttcaatggctagatgagcgcagcagagatgaataaaaacttttaaaattccaatgataatatgccccctttcttcatagtactcatgttactcatgctgagagtagctatgcactttgggtatttagagagaaattctttttagaggaatattttctgactgacttgagcaatcttatatctaatctcaggttttttaaagaggcttttaacttccttttttctcaatataatctttcttggagtgagagctgtttttcttttgaatgctttgtatatctgttttagaagccctattggtatcccataatatctctgaaagacaggctattacagtgagaactcttggagctagctttatctggatgcatgctggaaatccagcagtatttttttcatgtaaccattataaatagaaactgtggcttaaacaatgctctctttaccattattgtgaaggtgcaattctacccaagaggcctgcaggctcttcttctgcagctcaggcttcgctcttttttttttttttttttttttttttttgagacagtcttgccctgtctcccaggctggagtgcagtgacacgatctcagctcactgcaacctctgcctcctgggttgaagcaattcttctgcctcagcctccgagtagctgaaattacaggtgccctccaccatgcccagctattttttttttttttcttgtatttttagtagagatggggtttcaccatgttggccaggctggtctcgaactcctgacctcatgatccaccagcctcagcctcccaaagtgctaggataacaggcatgagccaccctgcctggccaggcttcactctttgatgtgacactaaagtgctgctgtgggaattggcattcacctaagatgtgagctgccagctgtgagccctgcgctatgggctgtatgtcagtggcaggtggtacgaaacagaagaggacactggccaccagaagaggggaagcaagagtgcgctagcacagtcttcagggagtagagagccactgatttaaaatgcaagtagccaaaaagacagcacccttttcagtcacttttgtagaagagtgaaagtctaccttaagcagttacctggcttcaagttgcaaactaccttctgtcatgaagatgtgaaaagcttattttgtcattgaatataaccagttagcatacatggatggcctccccaatgaccaggtgaatttaggatgaactatggcatggtgctgtaaattcttctacttgtgaactaattatggtaactgtctttctgtcttttcagtctcttaagtagactgactgtaatacatgtgatattcagatttaagtgtgtaatgaaacaattttctgtctgttacattattgtggtttctctggggctgaagagaatttttaaaaaattatattttccaaacagtgtctagaattaccagacataatataaacacataaggtgccaaccaagctttattgtaaaggggactttccctcttagtcttccagtcaactcacaattatgctctaaagtgcatgctgtcacctaaatatgcaggcagaattgtgtctctgtctatttggtgtctatagtcctctatagtcacttctagaggggctagaccagatttctacaaactttatagggcagatattaatcattttacttcattccatgactcttttatcttcagaactgaaactgattcagagaccatggagcccagaaacctaatcagagtaacagtgtgcattgagtagacatggagacatgagaatctccacttcttttcccttctctcgctaaaatgctcacaattgcaggtaacaactgctgctactccacccatccgggacctaaatctgcagctctgaattctaaatctaggtcttgaaatttgaaaaaaaaaaaaaaaaaatccaaaacttttatttgaggaatgaaagtctttttacttataaaactcagagagacattaaaataaaagcacaattacatctttctcccttccttcaactatgtattcatctcttgacattgttcactattgccacaggtaggtgtaagttaaactaataatgtcacactggacactatattctatacccttacccttaatgtacagtcaatcaataattaaagttatttatttaaacaagaatttctgacaaagaagtttgtatgtctctctctctttttttttttttgccttcacaaatccacttgtaactgctgctaatcaaagtgcaaattccaggcatcttgaatatttcttctcaagttacaatacttaagcttggcccaaataaactgtctacttatattcatgttgtgtcagcttttttttttttttttttagatgtggttttgctcttgttgctcaggctggagtgcaatggcttgatcttggctcactgcaacctccgcctcccaagttcaagtgattctcctgcctcagctttctgagtagctgggattacaggcatgggccaccatgcccggctaattttgtatttttagtagagatagggtttcttcatgttggtcaggctggtctcgaactcccaacctcaggtgatccttcgacctcaggggatccgcctgccttggactcccaaagtgctggaattacaggcatgagccatggcacccagcccgtatcagcctttttttaggtaaaatattatttagaattttctagagcagcctctatgagtagatcttttgattgtactctacttgctgtaacagccagaaatgcagaatgatgtttatctagaatctgcaaataaggtctggcctctgcctggaatttataaaacagggtcctactttagattgagaatgtacagaaaaccaataggaggcattttctgcattgtgagatgtcaacatagacattttagatccctcctttgagagtgtggctctttgaccttttcacatcttgtgttttcacctgctacagttatgtgagaggctccaggtgtaaatagaatctgatggcagaatctcttaagtgtaaagaagcatcttaggagtgagagatcaaggccacaaagtagccagagctctgagcacaagtatacttacctggaaaatatgatattagagtattcttgcacttctacataccaaaaagctagctaatcaggacaggtgatccaggttctgcagctccaccagggtacttccattttctatttagaatcagcctgagtctctcctgctggcttgctattgaaccatcagtccagggtcactggaaatgctctcacaatcacctaggtgtctttgagacatttgagaatctccagaacagaattgtgtcaggctgacaagagtgggcaattttgcttctgtcttagtgtaaatgaaatgagtcatcctgtgattgttcctcccctcatgcaagagctgtcttcggttggtacccagatgagagtttctccagttccctggtacttgggtaaaaacaaggaggaggtctgcagactcaaagagataaactaattgcttctatttcatatagtcattagaaaaatagatgacgcagtcatggtccctaccatgcaggaacttttagtctagactagcaactggataaatgatttaattatgcatcatatggtgggtacaataaatagatgtgtgcaaaaatatgggctttatttgggccattttctttatattgtgacttcagatgtctatacctgaacatatattaataaacaaaatttgtttttttttttttttgccttgctaagtaaacttatttatcttctaaattattctagaaaaccttaagggatttgtttaaattgcttattagtatgtgatatgaaattagagggcaatggggctaaaaaagattaaaattacacaaactctgagatttaagttttttttttttcttttaggtaagcttaaaaaaagaaacataaaaaaaaaatactccccagtggtgtaaagaacagaattttacatcaactctacaccctgcttcagccctgtttagattcaccctttttgaaggccttatttaagtcttgccctaccctggagttttgcctcacagaactaactagaagagatcagagttttgggtgatgaatcctgttgcctttttagagttggtgctcacacttttctgaaacccaatagcagataaatggaaaaataacatgtattatagggtcttaatttaataattttatattaaaaccagtgtttacagagacattccatttagcaacttgttttctgttcctgcagatatagtagttgattcacaagtcacaaaatagcaaatataaatacaataaaaattcatctacatttcattaaactctatctgtgtccttctcatctgtctgtatttagattttattccatgcattttaaaaaactcaatgataaacagaagaggaaataaaaatgctgggtctttattctaaatccttggatttattggacacttagtatcaactcacagggtattattagaatcaaataatgtgctatcacagtgctctgtaacatcctgttgatcacatagtacctgcttaataaacattgcattaatacatgtgcacatgttgttttccaaatgcagacttactcagaaaattgctgctttctgttttctctgtaaactttaaagagccagaaaataatatgatactttaagatagagaatggttgtcttcatttgcatcagaagtatttgtgtttttacaaaagtgctgagtgtaaggggctctgtgctgtacctcatttttctaactaatgctaacaatgagcccagagagagtgacaccagcattgacagaagacttgtttagaacacccatttatggaccatttccaaacctgcagaatcgcattacatagagtggggccaattttacaaagcgattcataagctcattaaagcttgagtgataatgcttaggtaagtggttataagatcaggcttctaattagaatcacatggccaatatgcagaactctctttacttgtgcccttttcacagtttctgttctgggtgaaagcgtctatttgttttaattaagtgcctcatgtgactctcaggtgccagcatcaaatatgaggagttcaagatacattcattgagttaagttccacttttgcactaaagaatgttctaggaatctgttctgtttgagtttggtaaggataggacagtgtggccaatatttctttccttttctttttctttctttttttttttgagatggagtctcgctctgtcatccaggctggagtcaatggcacaatctcggctcactgcaacctctgcctcccgggttcaagtgattctcctgcctcagcctcctgagtagctgcgattacaggtgcctgccaccattcccagctaagttttgtatgttaggtagaggtggggtttcactctgttggccaggctgatcttgaactcctgacttcaggtgatccacctgccttggcctcccaaagtgttgggatcacaggcgtgagacaccacacccagccaacttttgtatttttagtagagatggggtttcaccatgttggccaggctgctgttgaactccagacttcgtgatccacctgccttggcctcccaaagtgctgggattcgatatttctattactgtagcagaaattcctggtgtttgtaacaggggagggcgcctggggacaaaaagaagagaaacttatatttttctctctgtggagcagctcattgttcctgaatcttttttgttgtaaaggacagaaatgggtagagtttttgtgtcttgagccttctgactttgagtgtggtggtaacaggtgaacatgtgctcaaatttttaaaggcatattgtcaagatgcaggtgtaattagtccagaatatctcatctgagaaagaattctagaggaggaggagagagaaaaagtgactttttttttcagctaaacgtgtcccagatcaagagctgtgtctactctgctttctggaatgccttgcatttagtacttgcaaatcttcacttctatacctgtgttttttctccctaataagtttttcttaactacttttaaaaatgcttatgatagtcgagggtgtctgaaaaatttttctatatacaagaatcttctctacatcatggctttttatatgccatgtaagattctcaccatgaatttgtgatctgcaatattaaaaatgttctccttgtggctgatgaacatggagaggggtggatactcaatatttctgtggggaaaacctggggttcttagtaaagacatagaatatgtaatgttgaggttctatctgtgttctttattatctgtatgcattacacaattaagaaaatactcatttaaacaggatggcatttattacccagaaagctctgaaaaaattatcaagagatacctccttattagggtgctatagaaagactacttaaaatcactattacaaattacagaacatgaaagatatctgtatcttgaacttcccataaaactgatgttttcttatgattaaattcagactgtaatttagtgggtacaatatctcagtagtaatgtcgtgtccttctgggtgcatcagcacactataaaaacctgtcctagtgcagttgatgttgatgctaataactcaataagctctcttacagattttttcactatagaattatttttctcttcatcattagatatctttatggagctgatgtgcataaaccatcacgtttaatctggctgccttttgttttttgtctttttcttttttttaggttttctttacatttatttttctttggtaaatgaaagctctcatctttgtttacaggctagaaaaactaaaaaaaaaaacaaaaaacaaaaacaacaggctcttccacttactggatgtttgacaaaatagtcttttggggccaaaacattggcattactggtgagcttggtagagattcattaactcagactttatttcagatctccccaaaaaataatctgcattaacaagatgtccagtttattgtacacgttaaaatttgagtggtaccttctaactcaagatgtctattttgtctgaaaaatataaacaactatgtctttttcatctgaaaaatatacataactcattctgcattatgtaaacgtagcactcaaaaatgtatgttagtgtttatgccttcaattttacatgttatcttccagacaagtatcacatatacactgatgtggatattttgccactctattttctcagagttagagaatacattagaaaatgttcatgtgttgacaattattttattggataatttcaatcactcttataagtcagaaccagttctatttactctaattttaccttgagtcaaatgaaaaattctgccgatagccactttgtaaatatgtgtgtttgtgtgtgttttccagggactgttgacatttagggatgtggccatagaattctctctggaggagtggcaacacctggacattgcacagcagaatttatatagaaatgtgatgttagagaactacagaaacctggccttcctgggtgaggataactttaatacaaaattcctcacataaactaaagcttttatttttctttagaatgttttctggtaatttacgcattcagatttctgttttcaagaaaatactggggatttgtctgttgagaaaggaatttcttcaagatgtttcatcttgacctgaactttccacattcctgagctaatctgtgtcctgcactttagattaaggctaatttcagaagtttagtggcataaaatattgttacatcttaaaatccatttggcatcaccaatttttgattcagtagtaccaggcagtgaaattaagaacctaaaaaattaaaatatttcctaaatatttaaaaatttctgttataaattagtgtattagaataactttgttagcatattctattatatcctccttactgagcacattactaagttggtaattggagaatataagcaagattcatttagttatttttaataaaacaggtattgctgtctctaagccagacctgatcacctgtctggaacaagggaaagagccctggaatatgaagcgacatgagatggtggatgaacccccaggtaggtgagagtgaatacaacagatgacatggatgagaggtccaaagtcaagaagaaagccactctttaaagtgatttaagaagctgtgatccaaaggaaatagtttctgggaagcctaaattttttttttaaattatactctcacataggggcatcttctgcttatgcctataaaatctaagaattctactttcccttcaatgatcttcctccaagtttacagtgacagccgaagtactgttcatggcatacaaaagagtgtacaatctgacttcttttttcttgttttgtggacagacagatctgtctccataattttgagatactgtatgttaaactgttttttaagttctctttttgcatcatgtctgaaatgtgtgagagtagtagtttctgttatattgggttttttctttttggtttatttttctgcacatttcatcctgttttcattactgtagtcttgaaatatagtttgaaagtacaaagtaggatgtccttctgctttgttctttttcctcaagattgctttgactattcaaagtttattgtagtttcatgtccattttaggattggatttttcattactgtgaagaaaaacactggaattttgataaggagttctttaaatctacaggtcactttggataatatggcagtttcataatacttattctttcaatagaaataaaacattttaaaatttattagtgtcctctctaatttttttcattgatatatctttcacttgaaagatttatgagctccttgtttaaatttgttctaaaattgagtatttcattgatattgtacataagtttttttttcctctattttatcagatagtttaagtgtatggaaccatatcttgtatattaattttatattttgctaattaactgagtgtattcattaatttaaacaggttttaatgtactctctctatatacatatatatatgattacatgatctacaaacagcaacattttacttattggtcttcaatttcaatgactttaaatttttcttttgactattttgtcttccacatgctttcagtgctatgttaaaatagaagctagttttgcattagtgtctgtaaatttgaaggagcaaacacctcttcaagtttctataaactggtttcagaaagtaaaaatgtgtttttgttgggcccccagagtgatagaatgtcctctgggtttgtagtgaagaggggttgtagcttggccttaaggctgctgggtttgcacaagggtccaccttcagttgtcttcttaaaaggagcttggatagttgtaattctcatttaatttttggacagattgaatatccttcaggactttgctgtgcagggcagacccaagggcaggtttctgcactcaggcctgcatatggtgagttttatatcaggatgtggatgagcatggctttcactgagtacaggagaggattttccgaggtaactttgggtttctacataggcaaaaccggccatgaactatggctcagggagctggaactgagtcatggaactgcttcagggaccacagtaaaggtcaaggtctgcaggcctgccagcatggctctaaatgggtgtatttctccaggcctctggaaaggcaggacccccccagactgtgactgggaagagtttgggatgtttacagagtaagtttaaaattctcaggggaaccaagttaggtggaacaatttcttgtctttagccaaaaacagtagttctgtagtttgccacctgaatgaggacctgccttctgaaaagggttaccttcagtcttgggctttagcagagtttcacaactcctttcctggatctcagagttcttttaaaggcatttatttttgatctggggtattgtaacataacccaggcaggtcttaatattttgatcaaaagcaattctccaactttcatgtaccatgtagctgtcattacaggtgtgaaccatgatgcctggttctctcataaaggcatttttgtcagcaatggctgacaaattttcttgctgacagaggataagcaaataaggcacctttaattttttatcttattaatgccactctccatataaattttaactgttttctacttcaaatttgtctgtaattttagattcagacatttagggcaatataatagaatatacatgtcgtgcctgaattaaattagataattagtatgcaggcaggcaaaaaggaattatagagccaggcgcggtggctcacgcctctaatccctgcactttgggaggctgaggtgtgtggatcacgagatcaggagattgagaccatcctggctaacacgatgaaaccccgtccctactaaaagtacaaaaaattagccgggcatggcggcacgcgcctgtagtctgagctactagggagactgaggcaggagaatcgcttgaacctgggaggtgggggttgcagtgagccaaaatcatgccactttgcttctaaacttggattacagtagttttattttgtgtaaaataacatgtatttaaaacataaaaattgagactagtttcttttaaatgcttatctattaaaagtttctcattagcatctcctaattatgattttactgcatttactctgaaattttattgctacataatagatgccattaatttaaaacacctgccttccttgaatgcacagttacagtcaaacattgcagttatctagacaaattgtttgttaatgtacattaatgttgccaactagattttatgagtaaacatttctttcattattatcttccagttctatattagtgtgttttttaagtgcaggtttcttaatatcagtttattgtgtctattgatttcgtgcattataattttagacaatcggcaattctgtttgtatactttaagtcagtgtctggtttaattaaaagataaatgagccatatgtctgtcatagtcagattatctatatgtgtgtgtttatgtctacaaatatgacccaaatttggttatagtttacttgtatatattctttcttagctaattttctttttcttttttcttttttcttttcttttcttttttttttttttgagacagagttttgctcttgttgctgagtctggagtacagtgcatgtgatctcggctcactgcaacttcctccacctctcgggtttaagtgattctctagccttagcctcctgagtagctgggattacaggcatgtgccaccatcccaggctaattttgtattttttttttttttagtagagacggggtttgccatgttggtcaggcaggtctcaaactcctgaccttgggtgatctgcttgccttggtctcccaaagtgctgggattacaggcatgagccaccgtacccggcctcttaactcattttcagtgttggttttatcttgtctaagtgagtagccttggaaatagtcttattttcaccatgtgtttaatgataaatatgtattttctttgtgtgagaaaaacacttttgtgatttgaaggtaatttttaaaaagatgtataattctgtattttttccagtttttaaaaattattgttgtaaaaacacttagcatataatttaccttcttaaatctatttaaatgtacatgtcagggccaggcatggtggtggctcatatctttaaaaccaggattttgagaggccaggacaggaggattgcttgagcccaaaagtttgatacaagcctgggcaaaatatggagacaccctctctacaaacattttttttctaagaaatagccaggcatggtggtgtacacctgtggtcccagctacttgagagactgaggggcaggattagttgagcctgggattgtgaggctgcagtgagccataattgtgccattgcgtgcaagcttgggtgacagattgagaccctgtttcaaaaaaaaaaaagtgtatatttcaggcatgttaactatattcacatcgttatgcaaaagacttctagaaattttacatcttgtaaaactaaaactcaatatcccttaaataacatttacctattttatgctctctacaacccttggcaaacacccttccaccttctgtttttatgagtgtaattactttaaatatttatataagtaaaatcataacatccatcatttcattactggtttatttcagtggacataatattctcaaagtgtatctttaaaagtgacaagatttttttttttcactgttaaatattcttctttattttccatttcagtaaaacaatagcttaagatgcagggtgaatctatatttccttttttaattttatattttaatattattatactacaagttttagggtacatgtgcacaatgtgcaggttagttacatatgtatacatgtgccatgctggtgtgctgcacccattagctcgtcatttaccattaggtatatctcctaatgctatcccttccccctccccccaccccacaacagtccacagagtgtgatgttccccttcctgtgttcatgtgttctcattgttcaattcccacctatgagtgagaatatgcagtgtttggttttttgttcttgcgatagtttactaagaatgatgatttccagtttcatccatgtccctacaaaggacatgaactcatcattattgatggctgcatagtattccatggtgtatatgtgccacattttcttaatccagtgtatcattgttggacatttgggttggttccaagtctttgctattgtgaatactgccacaataaacatacttgtgcatgtgtctttatagcagcatgatttatagtcctttgggtatctacccagtaatgggatggctgggtcaaatggtatttctagttctagatccctgaggaatcgccacactgacttccacaatggttgaactagttgacagtcccaccaacagtgtaaaagtgttcctatttctccacatcttctccagcacctgttgtttcctgactttttaatgatcgccattctaactggtgtgaaatggtatctcattgtggttttgatttgcatttctctgatggccagtgatgatgagcattttttcatgtgttttttggctgcataaatgtcttcttttgagaagtgtctgttcatgtcctttgcccactttttgatggggttgtttttttcttgtaaatttgtttgagttcattgtagattctggatattagccctttgtcagatgagtaggttgcgaaaattttctcccattttgtaggttgcctgttgactctgatggtagtttcttttgctgtgcagaagctctttagtttaattagatcccatttctcaattttggcttttgttcccattgcttttggtgttttagacatgaagtccttgcccatgcctatgtccggaatggtaatgcctaggttttcttctagggtttttatggttttaggtctaacgtttaagtctttaatccatcttgaattgatttttgtacaaggtgtaaggaagggatccagtttcagctttctacatacggctagccagttttcccagcaccatttattaaatagggaatccttgccccattgcttgtttttctcaggtttgtcaaagatcagatagttgtagatatgtggtgttctttctgagggctctgttctgttccattgatctatatctctgttttcgtaccagtaccatgctgttttggttactgtagccttgtagtatagtttgaagtcaggtagcatgatgcctccagctttgttcttttggcttaggagtgacttggtgatgcgggctcttttttggttccatatgaactttaaagtagttttttccaattctctgaagaaaatcattggtagcttgatggggatggcattgaatctataaattaccttgggcagtatggccattttcatgatattgattcttcctacccatgagcatggaatgttcttccatttgtttgtatcctcttttatttcattgagcagtggtttgtagttctccttgaagaggtcctccacatcccttgtaagttggattcctaggtattttattctctttgaagcaattatgaatgggagttcactcatgatttggctggttttttgaaaggatcaacaaaattgatagaccactagcaagactaataaagaaaaaaacatagaagaatcaaatagatgcaataaaaaatgataaagggaatatcaccactgatcccacagaaattacaaagtaccatcagagaatactacaaacacctctatgcaaataaactagaaaatctagatgaaatggacaaattccttgacacatacactctcccaagagtaaaccaggaagaagctgaatctctgaagagaccaataaaaggagctgaaattgtggcaataatcaagagcttaccaatgaaaaagagtcctggatcagatggattcacagccaaattctaccagaggtgcaaggaggaactgataccattccttctgaaactattccaatcaatagaaaaagagggaatcctccctaactcattttatgaggccagcatcatcctgttaccaaagccgggcagagacacaaccaaaaaagagaattttagaccaatatccttgatgaacatcgatgcaaaaatcctcaataaaatactggcaaactgaatccagcagcacatcaaaaagcttatccaccatgatcaagtgggcttcatccctgggatgcagggctggttcaatatatgccaattaatcaataaatgtaatccagcatataaacagaaccaaagacaaaaaccacatgattatataatagatgcagaaaaggcctttgacaaaattcaatgacacttcatgctaaaaactctcaataaattaggtattgatgtgacgtatctcaaaataataagagctatctatgccaaacccacagccaatatcatactgaatgggcaaaaactggaagcattccctttgaaaactggcacaagacagggatgccctctctcaacactcctattcaacatagtgttggatgttctggccagggcaattaggcaggagaaggaaataaagggtattcaattaggaaaagaggaagtcaaattgtccctgtttgcagatgacatgattgtatacctagaaaaccccattgtctcaacccaaaatctccttaagctgataagcaacttcagcaatgtctcaggatacaaaatcaatgtacaacaatcacaagcattcttatacaccaataacagagagccaaatcatgagtgaactcccattcataattgcttcgaagagaataaaatacctaggaatccaacttacaagggatgtggaggacctcttcaaggagaactacaaaccactgctcaatgaaataaaagaggatacaaacaaatggaagaacattccatgctcatgggtaggaagaatcaatatcatgaaaatggccatactgcccaaggtaatttatagattcaatgccatccccatcaagctaccaatgattttcttcagagaattggaaaaaactactttaaagttcacatggaaccaaaaaagagcccgcatcgccaagtcactcctaagccaaaagaacaaagctggaggcatcatgctacctgacttcaaactatactacaaggctacagtaaccaaaacagcatggtactggtacgaaaacagagatatagatcaatggaacagaacagagccctcagaaagaacaccacatatctacaactatctgatctttgacaaacctgagaaaaacaagcaatggggcaaggattccctatttaataaatggtgctgggaaaactggctagccgtatgtagaaagctgaaactggatcccttccttacaccttgtacaaaaatcaattcaagatggattaaagacttaaacgttagacctaaaaccataaaaaccctagaagaaaacctaggcattaccattccggacataggcatgggcaaggacttcatgtctaaaacaccaaaagcaatgggaacaaaagccaaaattgagaaatgggatctaattaaactaaagagcttctgcacagcgaaagaaactaccatcagagtcaacaggcaacctacaaaatgggagaaaattttcgcaacctactcatctgacaaagggctaatatccagaatctacaatgaactcaaacaaatttacaagaaaaaaacaaccccatcaaaaagtgggcaaaggacatgaacagacacttctcaaaagaagacatttatgcagccaaaaaacacatgaaaaaatgctcaccatcactggccatcagagaaatgcaaatcaaaaccacagtgagttaccatttcacaccagttagaatggcaatcattaaaaagtcaggaaacaacaggtgctggagaggatgtggagaaataggaacacttttacactgttggtgggactgtcaactagttcaaccattgtggaagtcagtgtggcgattcctcagggatctagaactagaaataccatttgacccacccaacccattactgggtagatacccaaaggactataaatcatgctgctataaagacacatgcacaagtatgtttattgtggcagttttcacaatagcaaagacttggaaccaacccaaatgtccaacaatgatagactggattaagaaaatgtggcacatatacaccatggaatactatgcagccatcaataatgatgagttcatgtcctttgtagggacatggatgaaattggaaatcatcattctcagtaaactatcgcaagaacaaaaaaccaaacaccgcatattcccactcatggggggaattgaacaatgagaacacatggacacaggaaggggaaaatcacactctggggattgatgtgggatggggggatgggggagggatagcattgggagatatacctagtgctagatgacgagttaatgggtgcagcacaccagcatggcacatgtatacatatgtaactaacctgcacattgtgcacatgtaccgtaaaacttaaagtataataataataaaaaaagaaaaataaataaagttaatattgttatgtgtgaatttgatcctgtcgttaggatgctggctggttattttgctcgttagttgatgcagtgtctttctagcctcgacggtttctacaatttggcatgattttgcagtggctggtaccggttgttcctttctgtgtttagtacttccttcaggagctcttttagggcaggcctggtggtgacaaagtctctcagcatttgcttgtctgtaaagtattttatttctccttcacttatgaagcttagtttggctggatatgaaattctgtgttgaaaattcttttctttaagaatgttgaatattggcccccactctcttctggcttgtagagtttctgccgagaggtccactcttagtccgatgggcttccctttgtgggtagtccgacctttctctctggctgcccttaacattttttccttcgtttcaactttggtcaatatgacaattatgtgtcttggagttgctcttctcgagaagtatctttgtggcgttctctgtatttcctgaatctgaatgttggcctgccttgctagattagggaagttctcctggataatatcctgcagagtgttttccaacttggttccattctctccgtcactttcaggtacaccaatcagatgtggatttggtcttttcacatagtcccatatttcttggaggcttttttcaattctttttattcttttttctctaaacttcccttctcgcttcatttcattcatttcatcttctgtcactgataccctttcttccaggtgattgcatcagctcctgaggcttctgcattcttcatgtagttctcaagccttggctttcagctccatcagctcctttaagcacttctctatattggttattctaggtatacatttgtctaaatttttttcaaagtttttaacttctttgcctttggtttgaatttcctcctgtagctgggagtagtttgatcatctgaaggcttcttctctcaactcgtcaaagtcattctccacccagctttgttccattgatggtgaggaactgcgttcctttggaggaagagaggtgctctgctttttagagtttccagtttttctgctgttttttccccatctttgtggttttatctacttttggtctttgacgatggtgatgtacagatgggtttttggtgtggatgtcctttctgtttgttagttttccttctaacagacaggaccctcagctgcaggtctgttggagtttgctagatgtccactccagaccctatttgcttgggtgtcagcagcagtggctgcagaacagctgattttcgtgaaccgcgaatactgctgtctgatcattcttctggaagttttgtctcagaggagtacccagccatgtgaggtgtcagtctgcccctagtggggggtgcctcccagttaggctgctcatggttcaggggtccgggacccacttgaggagtctgtctgcctgttctcagatctccagctgtgtgttgggagaaccactgctctcttcaaagctgtcagacagggatatttaagtctgcagaggttactgctgtcttgtttgtctgtgccctgcccccagaggtggagcctacagaggcaggcaggcctccttgagctgtggtgggctccacccagtttgagcttcccggctgctttgtttacctaaggaagcctgggcaatggcgggtgcccctcccccagcctcgctgctgccttgcagtttgatctcagactgctgtgctagcaatcagcgagactctgtgggcgtaggaccctccgagccaggtgcaggatataatctgctgttgtgcggttatttaagcccgtcggaaaagcgcagtattagggtgggagtgacccgactttccagatgccgtctgtcacccctttctttgactaggaaagggaactccctgaccccttgcacttcctgagtgaggtaatgcctagccctgcttcggctcttccacgctttgctgcccccactgtcctgcgcccactgtctgtcactccctagtgagatgaacccggtacctcggatggaaatgcagaaatcacccgtcttctgcatcactcacgctgggagctgtagaccggagctgttcgtatttggccatcttggctgctcaagattttttttttaaaactgaatcatattccattctatcatacatgtcttcaaggtcttttgttgcatattttatatatagattcataaatgtaattgctgtatttgataattttatttttagttatttgaagtacatttataacataataaaatagtatgtgcatccttgttttccaccaacgatgcacatgggtttcttttttttcttttctttttttttttttgaaatggagtctccctttgtcacccaggctggagctcagtggcacaatcttgactcactgcaacctccgcctcccgggtttcaagcgattctcctgtctcagcctccttagtaactgggattacaggcacgtgccaccacatctggctaatttttgtatttttagtacagatggggtttcaccatgttgatcaggctggtcttgaactcctgacctcaaaatccgcccgcatcagcctcccaaagtgctgggattacaggcgtgagccacctcacttggccaagggttttactgcatcatcaacagattaggtgtttttaaaaaattgatagtggtcatttaaatggatgtgatggattttctttttcgttgtgatttttatgcatttctctataaattagaaattttttgtgtcctttcaaattttttgtttgtgtttttcgatgaaaatgtatttcaattattttcctatttgtaaataaattcattcaaatttatttagttttaaaagtcgtttctattttttgaatattgactcctatcacatgtgatttgtaaatattttcacccattttctaggaggccttatccctctattaaatgtttacttacatatgcagaaatttggaagtgtagtatagttaaatttttgcttttttccttgttgcttatgcatttaatgttgtagctaagaaaatggcgccaagattattgtcatgtgtttcccctatatatttttaaatgatgaagaagttatctggcctggaatggcacctcacacctataatcctagcactttggggggctgagtggggtggatcatgaggtcagaagtttgagaccagcctgaccaatatggtgaaacctcatttctactaaaaatacaaaaaattagccaggcgtggtggtgggtgcgtgtaaacccaggctactcgggaggctgaggaaggagaataacttaaatccaggagacagagattggagtgattggagagcatgccaccacattccatcctgggcaacagaatgagactctgacttcaaaaacaaaaaaagttatcttcttatgtctaattaaaagatttttccacatatggtttaaggaaataaactttattattgtattttttattttttttgagatgaagtctcactctgtcacccaggccagagtgcagtgacacaatctcggctcactgcaacctctgcctcctaggttcaagcgattctcctgtctcagcctcccaagcagctgggactacaggtgtgtgcgaccatgcctggcgaatttttgcatttttagtagagaaggggtttcaccatattggctaggctgatctcaaaaccctgacctcaggtgatccacctgcctaagcctcccagagtgctgggattacatgtgtgagccaccattcctggccttatttgtttgttcttgagatagggtctcactctctcaaccaggctggtttgcagtgttgtgatcatggctcactgcagcctcaacctcccaaacttagaagattctctgattgcagcctctcaggtagctgggttacaagtgtgtagcttcatgtcctcccagtttttttgtatttttggttgagacaaggttttgccgcattgctgaggttggtctcaaacttctgagatccagtgaacaccccactttaacctcccaaagtcctgagattacatttctttttattaagtagtttaattaatttatatttaaaattatttcttaaaatgaaattactagttttattgctattgttttatgtgtttgagtggtatgttttttcttatttactgttttattgccttattttaattgtgtagtgacatgcttcaattattttttaaattttgttttgcatactttctataaatattatcttcataatcctcttgtatattagtctgttttcatgctgctgataaagacatacctgagactgggcaatttacaaaagaaagaggtttattggtcacagtttcatgtgactgaggagtcatcacaatcatggtggaaagtgaaaggcatgtctcacatggtggcagacaaaagaaagagcttgcgcaggaaaactgccttataaagccttctgctttcatgagacttattctctatcatgagaacagcacagaaaacatctgcccccatgattcaattacctcctactgcatccctcccacaacatatgggaattaaagatgagacttgggttgggacatggccaaaccacatcatcttaaaaatggaatttacataaaacatctaaaacttaaaaatatattttaatctcatgacaacttcagttgaatataaaaattatacctctgtatttttcagtttattaatataaaaattattttgtgtattaacatttatgcagatttttattgttttaaatattctacagaagagctttaagggttttatgcatcatcattatgatagtaaagatttctacatttgtatatttacattcaatagagagctttatttttatatatggttttatgatgctgtccagtattattttatttttaaataaaattgactcattttagcatttctttgttgttgttgttgttgttgttgttgagatggagtcttgctctgtcacccaggctggagtgcagcgggacaatctcagctccctgcaagctctgcctcccgggttcacgccattttcctgcctcagcctcctgagtacctggaactatacgcggctgccaccatgcctggctaattttgttttttttgtgtatttttaatagagacggggtttctccatgttaaccaggatggtctcaatctcctgacctcccgtttcttttttttatatgcaaactctcgctgtattattcaggctgatctgaatctcctggtctttagtgttgtgacagctttggcctcttaaaactgcaggattacaggcatgagccacagtgcctggccatcatgtagcatttttttgtagaactgtgctagtggtgatgaactccctcaacttttattttggagatttttagttttcatcctatttttaaagggaaataaatttaaatcaaatattcttggttacaatttttgtttgtttgttttactacatcaaaatttgggaaattctcaccttttatcttcaagtaaccactgtattgtttttttttccccatattcttcttctaagattaccttaatgaatatattgatctacttgatggtgtctaataagttttacattccatgttttaattttgttttgcaattttatatttttgtgttatatattctagcatatgccaccatacatctgatatttgtgttttgattttttagtatatatcataattgtgcatgacaatatttaactttgtacaatttaagaccctgtggagcaaaatcaaatatgaatcagccatatgtctttttccagtagaattatatctgtttgtttgcctgtataaatgttatcttttttaaattttttttttgagacagagttttgctcttcttgaccaggctggagtgcagtggcacgatcttggctcactgcaacctccgccttccaggttcaagtgattttcctgcctcagcctcccaattagctgggattacaggcgcccactaccaagcctggataattattgtatttttagtagagacagagtttaccatgttggccgggctggtcttgaactcctgacctcatgatccaccctcttcagcctcccaaagtgctgggattacaggtgtgagccaccacaccaggctacccttggtttttttttgtttgttttttgtatatttgttgtataggtttgttgtgaatggttttctaatcctttgtagatgagtagttataaaattcttgtaatttcaacatcctatttatgaatctatatgatttttgtgtgggagaaacacttttggatttgaatataatttaaaactcccataactctgtatctcttttgggtattattatttttacttgtcaaaaaaataacaaatttaccacaaaatatttttaaatattcagttaagtcacactaattatcttgacattgtcatgcaacatattgctagaatgtttttatcttgcaaagctaaatcttaatacatactgactaccacttttttcttgttttttttcttttttgaggtggagtcttgctctgtcacccaggctgaagtgcagtggcaccatctcagctcagtgcaacctccacctcctaggttcaattgattctcatgcctcagcctccttagtagctcagattacaggtgaccgccatcatgcctggctaatttttgtatttttattagagatggggtttcaccatcttggccaggctggttttaaactcctgaccttaggtgatccacccgcttgggtctctcaaagtgctcagattacaggtgtgaaccaccatgcctggccccaattttttctgttttatggcactttgcaaacgccagtctgttctttgtttctaagagtgtaactccttcatatatttcatacaatctgtcgttttgtggctggctcatttcattttacataatgccatcaacatttatctttatagttcgtacaatatttcctgctttttgaagactgagtgatatttcagaatttttatatttcaaattatatctactgaatgatttggtgaaagaaatctgccttgcttttacctattggcttacagtaacaatgctgcaataattatcactatgtaaatgactccttatatgaccatgtatgtgaaagtttatatatgtgctgcattctattttattagtctactttttcacctttatactcataccaaattgttttaattctgtagctttgtagtgtgatttaatcaagaactttaatgcctccagcattgttccttttattttttgaagattgttgggtactttattgtctcttgagattctatatacttttggggttgctgttcctgtttcttcaaaaatgcagtgagaaatttgaaaaacattcattaagtctgtctgttgcattgagctggatggaccttttcagaatattaattatttcaacctttgtttaaaagcacactcaagggtgtgttgtttaatttctatgtatttgtaaatttttcagtttttctgtcttattgttttatactcgtactccattttactcatagaaagtagttcatagaagtttacttttaaaaagtttggtaagacttcctttttggcttaagatgtggtttatcaagtaaaatgtatgagctattgagaaagaggtgtattctgatgttgtcgaggagtgttctccataactctgtttggaataattgttttatactgcctttaagtagtctgttcccttattaacattctttcttgttttatttttattacagaaagtgtggtattaaaatatcttgctataattgtattgctttgtatgtgtttcttccattctgtcaatatttgctttatatatttggaaccctaatgtgagacacacacacacacacctgcgtgcgtgcacaaacacatacacacacacacacaaatatacacaaatttttcataggttcccagtgaatgaatctattattttttgatgtcctttgtttctttggagtttaaatttaaagtacattttataaaatattataatttttgacttaagatgtagcttgtgtaagattattttgactgtttctgctctcatttgattaatatttgcatggaatgtctactttcttcctgcctcttccagtctttttttatcattagatttcaactgactcttgtagaaaggcaagatgaatctcagtttttaaaatattttaataaaactatttattgaaaatatgtctcaatttaaaagttaattttatatatattgaaataattttctgaaatagaaagacttactgttattttattaagtattttatttgattcttgcatctttgtcttttattctctttccatctttctttgtgtctttttgatatttgtattgataggctttgacttattttgttttgtgtatttatacaaatatttttgtggtacattggggattacatataacctctaaaagatacaacaacatattttaatctggtaaataaacttaagttgcgtacaaaaatttgttcttattataccttccctcaaatttgtcattgatgttgttaattatatctttttatattgtatattcattaatgaatatttaaaatgttttctatgcttttatccttcaaatttcagagaataattaaaaatgttttctgcaccactagggtaatgctaagaaatttgacttttgtgtatttgcatatttttcccagaaaatcatgtatttttatatgattctgtgtttttattggaatcatgttattttcagtagaaggaactcttttcagcaccttttatatgtagggcatatgcatttccaatatacttttttagaatttggttactttggaaggtttttactttttttatttggcaggacagatttgctgatggtattattctcaattaattaaaccttttttttttccacaatttttgtcatgactacatcacacagttcccttatggcctgcaaaatttttgttaacagttcactgactatctcataagattatgtttgtaaatggcacatcactttttttctttttcttttttttttttggaaacaagagtctcactgtatcctccagccaggcttgagtgtagtggtgtgacctgagctcactgcaagctccacttcctgggttcaagtggttccccttcctgggttcagcctcagcctcctgagtagctgggattacaggcatgcaccaccatgcctggctaatttttatagttttagtagagacggggttttgccatgttggtcaggttggtcttgaactcctgacctcaggtgatcggcccaccttggcctcccaaagtgcctggattacaggtgtgagccactgtgcctgacctggcacatcagttttatctggcagcttcaaaggtaatctttttgtctgtgacttttgaaattgtgcttatgtatgtgtttgttataaatatctttttgttattctagtttgtttgttgagcttttttatttttacatctttttttttttttttacttttaggatctgtcagtttttttgtgtatattttatctccacaatttgttttttgatatcttaactattttttattcttgtcctcatttttctgattttccatagttgtttctgttcccattttaatcagtattattcagtttattaccaattattaaaattaatgtatacatcttttttatgatttctttcagaaaattttgtgatatttttggtgggattgtattgccctattttgtatatattataatccttgattaagatttagacattaaaaaaagctacttgtcaaaatcttataatgtagctttgtcatggcatattctgaaaacaattgtctttgctggtgattatgagagtttcttaaacatattcttaggatatgtgttgtctgaaattttatttttattatttaattaggagagattactcgttaatttgtagcgtcatcacttgctacaccttttccatttctgtggtactgcagtctctctgctgctgtaacatttttctttggtctcagcagactcaaactctcattccaaaatataccaccatttctttcagtactttatgtcatgagagacagaaaccagtgtcaggaaaaaaccctaaaagccagaaatggcaatgattgtgccggtattttacctttcttttaaaacagaaaccaagagttggcaatttacttgtaaagacactatggtatagtgggaaacaggaaaagatgtattgagtaaatttaacagacttttctttttcttctttgtgtttttttgcattgtgctcacctgggacactgcacacacttaaatcatttatgaattttccacagatgtattttggtctgaatgtttttgttacatttatgtctatgaaagaattagagcctgtggtattttgcaatgctatcttgtctatgtagtttgtataattttataggtaagatttttaaactatattcatgtgagtctagtaagtggagtaatttatttatttttatttttttttcaggtatgtgtcctcattttgctcaagacctttggccagagcagggcatggaagattcttttcaaaaagcaatactgagaagatatggaaaatatggacatgagaatttacagttaagaaaaggctgtaaaagtgtggatgagtataaggtgaacaaagaaggttataatggacttaaccagtgtttcacaactgcccagagcaaagtatttcaatgtgataaatatttgaaagtcttctataaatttttaaattcaaacagacctaagataagacatactgaaaagaaatctttcaaatgtaaaaaacgtgtcaaattattttgcatgctttcacataaaacccaacacaaaagcatttatcatagagagaagtcctacaaatgtaaagaatgtggaaaaacctttaattggtcctcaacccttactaatcataggaaaatttatactgaagagaaaccttacaaatgtgaagaatataacaaatctcctaagcaactctcaacccttactacacatgaaataattcatgctggagagaaactctacaaatgtgaagaatgtggtgaagcttttaatcgatcctcaaatcttactacacataagataattcatactggagagaaaccttacaagtgtgaagaatgtggcaaagcatttatctggtcctcaacccttactgagcataagaaaattcatactagaaagaaaccctacaagtgtgaagaatgtggcaaagcatttatatggtcctcaacactaactagacataagaggatgcacactggagagaaaccctacaaatgtgaagaatgtggcaaagcttttagccagtcctcaacccttactacacataagataattcatactggagagaaacgctacaaatgcttagaatgtggcaaagcttttaagcaactctcaactcttactacacataaaataattcatgttggagagaaactctacaaatgtgaagaatgcggcaaaggttttaatcgatcttcaaatcttactacacataagataattcatactggagagaaaccttacaagtgtgaagaatgtggcaaagcatttatctggtcctcaacccttactaaacataagagaattcatactagagagaaaccctacaaatgtgaagaatgtggcaaggcatttatatggtcctcaaccctaactagacataagaggatgcacactggagagaaaccctacaaatgtgaagaatgtggcaaatcttttagccaatcctcaacccttactacacataagataattcatactggagagaaaccctacaaatgtgaagaatgtggcaaagcctttaactggtcctcaactcttactaaacataagataattcatactgaagagaaaccctacaaatgtgaaaaatgtggcaaagcctttaagcagtcttcaatccttactaaccataagagaattcatactggagagaaaccctataaatgtgaagaatgtggcaaatcttttaaccggtcttcaacttttactaaacataaggtaattcatactggagtaaaaccctacaaatgtgaagaatgtggcaaagcatttttctggtcctcaaccctaactaaacataagagaattcatactggagagcaaccctacaaatgggaaaaatttggcaaagcctttaatcggtcctcgcacctcaccacagataagataactcattggagagaaatcttacaagtatgaataatgtgccaaagcctaagaaaaccctcaattcttaatagatataagattattcctactggagagaaactacaaacctgagagaggcgctaatgcttttgacagtacctaaaactttaaagaaaatcattctgctgaaaaatcctagaaatgtgaagaatgtgaaaaagcctttaaatgattgtcacacttgattgtaggtaagataattcatactggagaaaactaccagtgtgaacaacgtggccaagcttcgacaatgctcacaccctattgcacaggaaagcatttatacttgagaagaaatgtacaaatattggcaaagtaaaaaatccattaacacctgctcacatcttactcaaaattgtagagttcatagtaaataaaagcattaaaattctaattactctcagaagatctgtcagaaagtatgtctttaaagtatagaagagcatttattttgaaaaaaacattacacatatgaagaggattgtaatatctttacttgtaccacagatcttattgtacacattttatactagagaaaaaccctcaggcagttgttaaaattttgttgaacatcagggagtttaagaaaaccctgcaagtataatgaatttggaaaaacattttttcaaaaactacaaattataaaacaccaaagtgttcatactaaaatatatttttgcagatacattaaatatgaaagatattcaatccaaaattaagtctatgtaaatatcagggaataattcacagtagaaatatctagggcattcaagctttagacattacactaaatcagagtgctgagtatagaaaataatacaaacagatttgtctaaacatttgtatataactttaaaaatagaatattttttggagggttataattacattcaaagtacttttttttgaaaatacagattttttttaaaagtgaataatgtgttcaactcttaaattcatgctgtttcatcattgctggtgtattcatatgtgaaagcatgtgactaattgttgctgcataaaagatatgagattcttttttattaggcattatttatgaccttttctatgaaaagataaggacattaaaatgtaagatgcgtgaggaaaatttaggtagagaggctctttgtggttaacttataatattgagtgatgcatgaggtaggtgttcagaataatattcctctgcattattatgaatgaaaagcattcttaattttagttaaaattaagttagtcatatgttattttattaattgtacttctatgaaataatatgcagtctatttttaaattataaattatgtgtgaacttagcttttcaattcaacatttttaacatattaaatactattgtgaattcaatgaagtgttcttatgccactaactttaacctattcccttactcaaggatgtaggtaaaagatggtaacaatacactatttggtaagataatgtactgacatctctagcaatcttttttgccagtggctttaaattgccaataagttaaagaatattgttcctatgggttaaatttttattcttattttcacatttaaatttatttttcttaatttttgtggatacataatatgtgtatatatgtatgccatatatggtatattttgatgcaggcatactctatataataatcacattagaggaaatgagatatccattacctctagcatttattctttttattacaagcaattcaattgtacacttttagttatttttaaatttacaatgttattgattacagggtcatttttatggtcataataaaaaattttatacaaacgtgtaaaatctatacatttctgagttctgaataaatatttttaaaaattttaatatatttttctttgaatatgtgacctttgcctgcaagcacatatggactcttagaattgatttacataaaattaaatatatacttctattaaagataaaccttaggtgtaaataaattatggagtaagtatgtttgtgtgagtataagtttgaaactatttttagcagcaaaaagaaatactcgaacaaaataaattattttaataaggtgtctaatttactagaaaacaaaaattttcaaaaatgctgaaaccaaatctatgctatttgctttgtattgaatttattactgtacagtctttgtgcttatgattcagaatctccgcatgcaaattctgtgttttaacttgactgatactcatgctagactcataactttctttgtttgttaattgtttgtttatttatttatttttgagacggagtcctgctctgtcacccaggctgaagttcaatagtgtgatcttggctcactgtaacctctgccttttaggttcaagcaattctcctgcctcagcctcccaagttgctgggactacaggtgcccaccaccatacccagctaatttttgtatttttagtagagatgaggtttcaccatgttggtcaggctggtcttcaactgaccttaggtgatccacccaccttggcctctgaaagtgctgggattacaggcgtgagccaccacgcccagcctgtgtaatagtctttgaagtattcattatgtgagctggtctgtaattataagaatatttttttttaattttattgttccataagctattggggtacacatggtgtttggttagatgagtaagttcttaagtggtgatccgtgagatcctggtgcacccatcatccaagcaggatacacttcaccatataagttgtcttttatccctccccactcccactcttcccctcaagtccccaaagttcattgtataattcttgtgcttttgtgtcctcatagcgtatttcccacatatcagtgagaacatatgatgtttggttttccattcctgagttacttcacttagaataacagtctccagtctcatccaggtcattgcaaatgctgttaattcattcctttttgtggctgagtagtattcctgtgtgtgtgtgtgtgtgtgtgtgtgtgtgtgtgtgtgtgtgtatccactcgttgattgatgggcatttcacttggttctatgattttttagttgtgaattgtgctgctagaaacatgtatgtgcaagtatctttttcaaataattactagtttttcttggatagatacccagtagtgggattgctggatcaaatggtagttctacttttagttctttaaggaatatccacactgtttttcatagcagctgtactagtttacattcccaccagcagtgtagaagttgtttgaaatgtttgttcctcagtgccataaagaaatagcacttgaacataaatttaacttatttagtaaggccatttttacttcctgcagaaagtatacactcgtcagcagttttgccacgagagtacaatgaataaaggagacagggtcatttataacctgacgcatccaccctactgctgtgtccggtttccattggctagaatgggacctcacattctgtatttatcccaattggctagcatcttagaactttttaaaagaggcaaaggtaaaggagaacaaagaaaggagtaagtaacttgtgggatgctgagaaaggtaaaaccacttttaaataaggaagaggagcaggctatgacctaatgcttgcttggaccagtataagcatgccagggcaaatatttaggagcacaggtctttgaataaattttgtctctaagaaaagttacaatttattcctaattagatggggggggggaatctttgaagaggaacctctactttactttttacaaagtgttccctaatcaccacatccatgccaacatctacagttttttgatcttttgattatgaccattcttgcaagaataaggtggtattgcattgtggttttgattttcatttccccgatcattagggatgttgagcattttttcttatgtttgttgtccatttgtatatcttctttagaaaattgtctattcatgtccttagcacagtttttgatgtttttttttttcttactgatttgtttgagttccttgtagattctggatattagtcctttatcagatgtatagattgtgaagatttcctcccactctgtgagttgtctgtttactctgcttactgttcctcttgccatgcaaaagctctttaattaggtcccagctatttatctttgtttatactgcatttgcttttgggtttttggtcatgaaatttttgcctagccagtgcctggaagggtttttccattgttatcttccagaatttttagagtttcaggtcttaggtttaagtccttaatccatcttgagttgattttttttataaggtgagagataaggatctggttttattctcctacatgtggctaccatcccagcaccaattgttgaaaagggtgtcttttccccactttatgtttttgtttacttttttgaagatcacttggctgtaattatttcagtttatttctgggttctctgccattggtctatgtgtctatttttataccagtaccacgctgttttggtgactatggttttatagtatagtttgaaatcaggtagtgtggtgcctccagacttgttctttttgcttagtctttctttggctctgtgggctcttttttggttccatatggtttttagaattttttttttctaactctgtgaagaatgatggtagtattttgatgggaattgtgctgaatttgtagattgcttttggcagtagggtcattttcaaaatattgattctacccatccttgagcatgggatgtgtttccatttgtttgtgtcatctatgatttctttcagtagtgtttggtagttttccttttagaggtcttttgactccttcattaggtgtattcctaacttttttttgtttttttccagctattgtaaaaggggagttcttgatttaattctccatttggttgctgttggtgaataaaagagctactgatttgtgtacattaatcttgtatccagaaactgctgaattctttgattggttgtaggagccttctggaggagtccgtagggttttcaaggtaaattatcatatcatcagcaaacagggacagtttgacttcttgtttactgacttggatgccctttatttctttctctgttctgatagctctggaggacgtccaggaatattttggagaggagtggtgagagtgggcatcctagtctttttcccattctcagagagaatgctttcaacttttcctcattcagtattatgttggctatgggtttgttgtagacagcttttattaaattaagctgttccttgtatgccaactttgctgagagttgttttttttttttttttttttttttttttttttttttttaacagagttttgctcttgttgcccaggctggagtgcaatggcaggatcttggctcaccacaacctccgcctcccgggttcaaacgattctcctgtgttagcctcccaagtagctgagattacaggcacatgtcaccatgcctggctaatttttgtacttttagtagagatgaggtttcatcatattggtcagactggtcttgaactcctgacctcaggtgatctgcctgacttagcctcccaaagtgctgggattacaggcatgagccaccatgtgcccggccaagctgagagttttactttcaaagggatgctggattttgtcaaatgctttttctgcgtctattgagatgatcatgtgatttttgttttcaattctatttatgtggtgtatcacatttgttgacttgtgtgtcaaaccatccctgcatccctggtatgaaacccactttatcatagtggattatctttttgacatgttgttggattcagttagctagtattttttttaaggattttagcatcaatgtttgtcaaggatatttgcctgcagttttctttcttagttgtgtcttttcctgattttgatactagggtgatgctggcttcatagaatgaattagggagggctccttctttctctatctggtggaatagtgtcaaaaagattggtaccagttctttgaatgtctggtagaattctgtgaatccgtctggtcctggacattttattggtaattttttgaattaccattttaatctcactgcttgttattggtctgttcagggtatctaattcttcctgatttaagctaggagggttgtatttttacaggaatttattcttctcttctaggttttctagtttatgtgtgtaaaggtgttcatagtagccttgaatgatttttttgtatttcagtggtgtcagttataatatttcctgtttcatttctcagtgaggttatttggattttctctcttttcttggttaatcttgctaatggtctataaattttatttatattttcaaagaagcagctttttgtttcatttaccttttgtattttttttgtttcagttagttctgctctgatcttggttattttctttttttgctgggtttgggtttggtttgttcttgtttctctagtttcttgtggtgtgtccttagattttctgtttgtactctttcagactttttgatgtaggcatttagggctatgaactttcctgttagcaccaccttagctgtatgccagaggttttgataggttgtgtcattattgtcattctgtttgaagaattttttaattttcatattgatttggtttttgccccaatggttattcaggagcagcttatttaatttccatatatttgcgtggctttgaagttttctttgggagttgatgtccagttttattccactgtggtctgagagagtgcttgatatagtttcagttttcttaaatgttttgaggctcgtattatgacctatcatatgatctgtcttggagaaagttccatgtgctgttgaggagaatgtgtgttctgcagttgttgaatgaaatgttttgtatatatctgttaagtccatttttttccaaggtatggtttaaatccactctttctttgtcgactttctgtcttgatggcctgtctagtgctgtcagtggagttgaagttccccactattatagtgttgctgtctatctcatttcttaggtctattagcaattgtttttataaatttgggtcctccagtattaggtggatatatctttagggttgggatgttttcctgttggaccagccatttactgttatataatgtccctctttgtctcttttaaccaccgttgctttaaagtttgttttgtctgatataagaatagctgcccctgcttgtttttggtgtccatttgcatgaaacgcctttttccacccctttactttaagtttatgtgagtccttatgtgttaggtgagtctcctgaagatagcagatagttgattggttagttcttatccattctgcagttctgtatcttttagtggagcatttaggccatttacattcaatgttactattgaaatgtgaggtgccattgcattcattatgctctttgttgcctgcatactttggtgttttttttgttttgtgtttttttttttctgttttttgtttgtttgtttgtttttgagatggaatctcactctgtcacccaggctggagtgcagtggcgccatcttggttcactgcaacctccccctcccaggttcaagcgattcccctgcctcagcctcccaggtagctgggagtagaggtgcccaccaccacgcgtggctaatttttgtgtatttagtagagacggggatgcaccatattggccaggctggtcttgaactcctgaccttgtgatctgcccgccttggcctcccaaagtgctgagattacaggcatgagccaccacacctggcctttttttttggtttttcatttttgttttttatcttgtatttgtgttttataaatcctgtttgatttatgctgtaaagagattctgtttggttgtgttttcaggatttgttttatgatttaaggtttcttttggcatttttgtattaggggcttgttaatggtgaattctctcagcatttgtttgtctgaaaatgactgtatctttccttatatataatgcttagtttcactggatgcaaaattcttgactgataattgttttgtttgaggaggctgtaggtggggccccaatcccttctaacttgtaaggtttctgctgagaaatctgctgttaatctgataggtgttcctttataggttacctggttcttctgtctcacagctcttaagatttttttgtcttaactttggataacctgatcacaatgtgctaaggtgaagatctttttgctatgaatttcccaggtgttcttcgtgcttcttatatttgtatgtctaggtaaggccagagaagttttacttgattattccctcaaatatgttttccaagcttttagaattgttttcttcctcaggaacaccaattattcttaggtttggtcatttaacataattccagacttcctggaggctttgtttatattttcttattctgttttgtcttcgttggattgggttaattcaaataccttgtctttgagctcagaatttcttcttctacttgttaatttttattgctgagaatttcctgatcatttcacatttctaaaagtgtgtccaatgtttcctgaattttttttttaagctatctgtttcattgaatattttgcccttcacttcttgtgtgattttttgtatttccttgtgttgggctttgcctttctcccatctctccctgattagcttaataactaacctcctgactccttttttttcagataaatcagggatttcttcttggtttggttctgttgctggtgaactagtgtaatttttttggggggtgttgatgaacgttgttttgtcatattaccaggtttgcttttctgttccttctcatttgggtaggctttgtcagagggaaggtctatggctgaaaactgtttagattttttgacccacagggtattccctttttctgtggatgtggctttccatgagctgaactgtagtgattggtgtctctcttctgggtctagccacccagtgagtcttccctgctccaggctgatacttggggttgtctgcacagagtcctgtgatgtaaatcgactgtggatctctcagccatggataccagtgcctgttccagtggaggtggtgaagggtgcagtggcctctgtgggagtccttagttttgatggtttaatgctttatgtatgtatttatttttgctagtgggcctcctgccagtaggtagcacttctagaaagcatcagctgtagtagtgtgcagagggactggtggtgggtggggccttaggactcccaacattatatgtcctttgtcttcccctaccagggcagatagggaaggaccattgggtgcagggggcactggtcgtgtctgagttcagactctccttgggcaggtcttgctgtggttggtgtaggggatgcaggtgagagtcccaggtcactggagttgtgtacctaggagaattatagctgtctctgctgagccacacagagtgtcaaggaagtgggggaaagcgagtagtcacaggcctcactcagctcccatgcaaaccagagggccattctcactcccactgtgtactccacaacaaccccaagtctgtttccagatggaaggctagttgggcttgaaaattgctcaaggctttctgccttccagttgcaggaaaaaaaagggctttagttcttccccgcctgtgaagtctgcaagccagattcgcgcctttccctgagttctgggcaggaggcttcttggcccgttcaaattgttacaaagttcagctaaggaagtctttttccacttggaattttacctctgctcctctgtcctccctcctgaaggatccctgtggtgccaggcaggaatgggctgcttggggatttatcaagcccccagggcctccctgctgcctgctccacccctgtatttcactcagcttggctctaatttgatgcagctccaggtagtcaggaaattatcccacaaacagactttcagcttctccagtgggggtgcgtgtttgggagaggagggtctccctttctcacttctgcatttggggcactcacagtatttggagtgtctccagggtcctgcagtagcagtctgcttccttcagagggtctgtcctgatgcctttaaagacacattctcaagattctcagataagtgtgtcccaggtaaaaacagtgtccacattttcttttagaatgtcatgtgtttagaattgcagtcatttacatttctacttctgatgcttttgcctaagaagattatttcaactacctttccccttttcttctcatgacagtgaaaggacttctttaaaataattctcccctatatatcagagacttgtctttattctctccatccaggcttcttacatatcacaaataatactcatcttgagtttatatgctgaaatattggaagtattccctatgttgacaggtcagcctgggcaggtgggaatataaaacattcttattggggatggtgctgggtcctcagatatcagtgagggagaaaagtgcactgtttaggttccatctgaatgctccatcagctctatgaagaatataatttttaaatgcacacttaaaaaggatggaattggccaggtgtggtggctcatgcctgtgatcctagcagtttgggaggccgaggcgggtggatcacgaggtcaggagatcgagaccatcctggccaacatggtgaaaccccatttctgctaaaaataaaaaattagctgggcttgttggcatgtacctgtaactccagctactcaaaagactgaggcaggagaatcacttgaaactgaaagaggttgcagtgagatgagaagatgagatcacgccactgcaatccagcctggtgacagagcaagactctatctcaaaacaaaacaaaaggatagaattaggctgggcacggtggctcacacttgtaatcccagcactttgggtggccaaagtgggtggatcatgatgtcaggagttcaagaccagcttgagcagcatggtgaaaccctgtatctactaaaaacacacacacaagcaataaatctggaaaacattttccagttaaaaacacacacacacacacacacacacacacacacaaaattagctgggcaaggtggtgtgtacctgtagtcctagctacttgggagacaggcaggagaattacttgaacccaggaggcagaagttgccttgagccaagattgtgccattacacaccagcctgtgtgacagagtagactccatcccccccccaaaaaagaaaaagaatgggtagcctggaataattagaaagatatgcaaaggaagtaattcaaagaaatgtgacttctagaatgctacagagagtatttaaatacactattagaaattacaaaacatgggcaacatgtggcttgaactttacataaaacatgtttttcataattagattctgattctgatttacattttttggccagtaatttcaccgaagtcatgttgcatcatcctatatgtatcagcacataataccaatctgtcccattaattttattcacttggttaatgtgttttctgaaagacttcttcccccttccccgagatggagtcttgctctgtcatccagagctggagtgcaatggcacggtctcagctcactgcaacctctgcctcctgggttcaagtggttctcctgcctcagcctcctgagtagctgggattacaggcatgagacaccacgctcagctaattattgtatttttagtaaagatggggttcaccatgttggccaggctggtcttgaacttttgacatcatgatccctctgccttggcctcccaatgtgcaggcattacaggtgtgagccaccactcccagccaggatttcttcactctaaagttactttataaaaactgtattattcacaattactttggagagactttctgattaatgtgaataaacacatttaatctgaaatctcccctgttacaccaagtatcaggttccagtccaagctgaggtctgacgggagtcggtgggtgagtggtgggttgctggaaaaacaatcgaggattggtggggagttttggcatggctttattctctctatggtcacaagcctggtcatgagccctgtgtacagggtcagcagctttactctctctccctctcctgtccacctttctgtgtactcctaacacataatagtggctgagagccaagtatgatcttacacaaccaggttacataatgagtagaattgtgcatgtgtgctccaaactcactgagtcatgctgaaccagatgtttacctcggcctattcttgaccacagcacatccatttttcttacattccttttcttaatagtttatctttgtttatacgttgctttggaaaatgaagtgtgtcatcttttttttactggtcatatacagtgggataaaacccaggttcagtcacttactatatgttttaaaaagtattttccttaagctagaatcattgacatcattggtcagtttgttagcaatgcagtaactcaggtctcatcccagatctgttgagttagaatacatattttaacaaaatctccagtttattgatgtatgcattaaaatttgagaggtaatttctaatgtcctgtgacttctccatatgggaactatacacagtttactctgtataatgtaaatatagcactcaaaactgtatatgcttgtgtttgtgccatacattttatgctgtatcatcagaaaagtatagtacctacactggttttgtggatcttattctctttcctcagaatgatggaatacattagagaagctttctctattaaataatattttactggataatttcagtctcatgtaaaacagagccagttctcttaactctcaaacacctagagtaaaattaaccattctgcctatggccactttctaaatatgtgtgggtgtttggggttttttagaagatgttaatattcaaggctgtggccatagaattctctcaggagtagtgggtgtgtctgaatcctgctcagtgaaatttatatagagatgcggtgttagagaactacagaaacctgctttctttaggtgagagtaatttttccccagatttcctaatataccttaaagcttctattttatccctttgtagaatgattttgggaatttttgctatgcataaattatttttagatcaataaaattaaggaaaacttgaagttattggaatagaaaagaaaattttcaagatgttatatcttaacaggaaacttcccctttcttgagctaaactgtatctttcactctagattaatgataattctagaaattcagtggcataaagtattttccccaagtattaaaatccaatattcatcaccaattttaaattcaatagtattgaacagtagagctaaggatccagaaaactaaaatacatattaaatattttaacctaaatattctaaaggttctgtcagaaaacagtattttggaattaaaattctagaatccttcataatattctctcctctctactgaacagagtactaggttggtaactggagaatcccagcaagtcatattacttttttttctaacaaaacaggccttgatgtctctaacattgatctgatctcctgctttaagcaaataaaagagccctggaatgtgaagagatatgagacagtagtcaaatactcagatagctaagcatgaatgaggcagataacaaagacaagaggtacaaaggtcaaagaattccagaccttaaaatgtggtatgtgttgctctgcttcaatggaaatatttcctagaaagtcatttttttttctagctctcaaataggagcatcttttgttccatacccttaaattctctaagggctccacttcctacttagtgattttcctttgagggtcttgtgagagctaaggtcctctttatggcttatgaggtatcacatgttattcctgttgttccattgctttggggggatataagaacgcctcttgattatttttgagcagctgcatataagattatttcttaagttttcttttcccatcatgtctgaaatgtgtgagagcagtggtgatattaagatttgtttcagaaatcttaggaacattaatgacagatgttacttgttatttttctattttttcattttgatattagcaatcctaacagatttgaaatggtagttcctcattgttttcatttgcaattgcctgttggtaggtgatattgaacacgtttttatatatctattggttatttgtatatgttggcaaaatattttttcagtcttttgaccatttttcaggtggattgtaattgtttttattatacttgcctctactttgaatttcctatatatttttaatattaaacttttcttgtatatattgtttgctattgtgagcatgctgcagtaaacatgcaagtataggtagcattttttttttttttttgagtcggagtcttgttctgtcgcccaggctggagtgcagtggctcgatcttggctcgctgcaggctccaactcccaggttcacaccattctcttgcctcagcctcccgagtagctgggactacagacgcccgccaccatgcccggctaatgttttgtatttttagtagagatggggtttcaccgtgttggccagggtggtctcgatctcctgagctcatgatccgcccacgttggcctcccaaagtgctgggattacaggcgtgaaccaccgcacctggcccagatatcattttcatataataaatgatttttctttgggtagatacccaatgatgagatctctgaatcaaatggtagctctatttttagttgagattgagtttttttttttcatatgcatgttggctatttgtattctttattgaaaaatgcttagtaatgttatttgcctattttcaatggaatcctttttttattattatgacatttttgagttgtttgaattatttgtaaattctgaatattagttacatgttggcacatagttcgcaaatatgttcttttattctgtaggttgcctatttaccctgttgattatttttcttgctgtgcctaaacattttagtttgaatcccatttatctattttttataataataacataataatagttttttttgttgtgttcttgactagttttggtgtcaaggtgatacctcagagtgacttaggaagaatttcattatcctgaatttttgggaagagtttcaggaggattattattcttagtgcatttggtagaatttggctgtccatttatctactcccgagcttttctttttcaagactttttttattactgcctcaatcatgctactcattattggtttgtgttactgttgtatccattgaaatgtctgttctttcacttctgattgtttatttagatctgtcttctgcttttggttaagctagctagcagtttatcaattttgtctttttgaaaaatcaactattctgttgatcatttttattgtttttggtcttaaattcatttggttctgttctgatttttgtttttttttttcttgtaacttggaatttggtttgttattaattttctagttccttgaagtgtgatgtcaagtccttaatatgtaagctttctacttttttgatgcaggcatttaggctataaactgctctctttgtactatatttgcatatctcacaggttttattatattgcatttctatttccatcttttttcccacaatttttaaattttcattttaattttctttttgagatgggttttactctgtcacccaggctggagtgtagtagcacaatcttggctcactgcaacctctgccttccaggctaaagcgatctttttatttcagcctcccgagtggctaagactataggtgtgcaccaccacatttagcttttttaatatgtattttttgtagagatggggtttgccatgttgcccaggctagtctcaaactcctgacctcaggggatccacctgcctcagcctcccaaagtgctgggattgcagctgtgagccaccacccctggccggccatcttaattacttcatttacaccgtgactgttcaggagtatgttgtttaaattctttgtaaatttatagtttctgaaatttctcttgatattgatttgtagttttattctcctgtgatctaagtaggtagttgatataattgtgatttatgggggtactttgttgatttgccaatttcctatctcaatggtctctctgatgctgtgagtagaatgttgaatttctccactatcattgtgttactatctctttctataggtttaataatatttctatttaaaatctgggtgctttgatgttgggtgcatagatatttagaattgttatatctttttgctgaaaagatttctttattattggatgattaccttctttaccctttttgttgcactttttatttaaagtgttttatttgatatacatacagatactcctgtttgcttttggtttctgtttctgttgatatctttcctcccttatttttaatctatatgtgtcttacaagtaaggtgagattcttgtaggcaccatagagttggacgattttttcttattcatatcataaatctatacattttgatgaaggatttaattaatttatattcaaggttaattttttctttctttttctttttattttttgagatggagtctcattcttgttgctcaggttggagtgcaatggtgcgatctcggctcactgccacctctgcctcccaagttcaagtgattctcctgcctcagcctattgagtagcggtgattacaagtgcccaccaccgtgcccagctaattttttgtatttttagtagcgatgggttttcacagtgttggccaggctggtctcaaactcctgatctcaggtgatccaccctctttggcctccaaaaggtatgagccacctcacccggccatggttaatattaatattaacatgtaggttttgttactatcataatgttaattattttgttttttttttcatctatctttctggtttaataaaattctgtcatgttgtgatttgatttatttctttttgtcttttgttttataagacctgttagttttatacttttgtatgttttaatgatggtgaatatcaatcttttgtttttctattagaagtaccggcctggcacaatggctcatgcctgaaatctcagcactttgggagactgaggtgggttgatcacctgaggtcaggagtttgagactagcctggccaacatggtgaaactccgtctctactaaaaattcaaaaattagctgggtgaggtggcgggtgcctgtactttcagctacttgggaggctgaggcaggagaatcacttgaacctggaaggcagaggttgcagtgagccgagattgtgccattgcactccagcctgggcaacaagagcaaaactgtctcagaaaaaaaaaaaaaaaaaaaaaaaagaaatccctgacatcttttatagacccagtctagtggtaattagtttccccagcatttatttgtcagggtaagactatttcttcttcatttgtgaaggttaatttaccttgatgtaaaatttttggctggcacttttatttcaacactctctaagtgccattccattatcttctggccagtaaagtttctgttgagaagtgtgcttttagtctgatgtggttttctttataaatgactagatgcttttcttttgctgattttataattagttatttcatttcgactttagaaattctggttatcatgtgccatgatgaagtctgttttgcaatttattttactggtgattgctgagcttcctgtatatgtatgtctaattctattgctagacttggaaatttttcatcatttattttcttaaataggttttctaaactttttcatgtttttttctttctaagaaacactgataatttttatgtttagtcactttatgtagtcagaaacatctcaaagttttcgttcgttttttaaaattcttcttagttttgtctgagtagattattttaaaagacccatttaaaggtctgaaaattctgtttatgccttttcagtctactattggatcattgaatgtattttctttttccttcagtaaatctttcagttccataattttgttttggtttcttttaaaagatatttatctccttggcacatttcccattcatactctaaatttatttatttatttttgtattggtttttagatttcttttgcatctctttgagcttctttaaaatctatattttgaagccttctaaaagtcttttaaagtcctttcaattattttttttttcttggaatactggagaattattgtgttcctttgaaagtgtcataaaccttgcttttctgtgttttctctgtctttatgtgtctttatattgatttctgcacatctggagaaacagttgtttcatttttttaaatttacattcactggaggaagcttttttttttgttttttgaagttattaccatgatgtttatcacatagaaccatttggctttaattttggatttgtgcagagggaaagactggataagtttcttgagtataaacaaatatatacacacacacacacacacacagaaacatgtttctgtgtgtgtgtgtatatatacacacacatatatatatatatatatatcacaaattttggcttaggagtcatcttttctcttaggttgatttttaattctaactcccagaaaacaattaatttatctttgttttatttgtcattgaggcccagcaaacctgaagtaaaagggtgagaaggtagggtgggtgctggataatgagaaattacttaagggttataatgtaaattatttgaatgatggataccctaaaagccctgacttcgccactatgcagtctatgcatgtaactaaattacatttgtacacaacacttttgtaaaaataaattaaaaagaacaactagagtttgctatcttgcttattcatacatacaaatacatcataaatgtttcccatgacattattattgatacaggagttaaaaagaaattatttaggcagatagtgagtgagggcaagaaagtccttcgtaaagctttccttttaataaaaagcagcccacaaattatttcttttttaacaaagaacagcctgtaaaatcaagctccaaacatcgataagcaagctgaaagcttgcatgaataaatgtcggcagctgtgccaataggaaaagggactaactgcggacggcgcatgtttaaaatggtgacaccctcttcccatttccttgttaaccacatgtacagtaagaagcaggcaacagggtgctggcaaatgctccatttgcataatagaagattagggtggagcagccagattccttgtgtgctgtgtaaactttctttattttattttattttattattatacattaacgtttagggtacatgtgcacaatgtgcaggttagttacatatgtatacatgtgccatgctggtgtgctgcacccattaactcgttatttagcattaggtatatctcctaatgctatcccttccccctcccccaagccacaacagtccccagagtttgatgttccccttcttgtgtccatgtgttctcattgttcgatttccacctatgaatgagaacatgtggtgtttggttttttgtccttacgatagtttactgagaatgatgatttccaatttcatccgtgtccctacaaaggacatgaactcatcatttttgatggctgcatagtattccatggtgtatatgtgccacattttcttaatccagtctatcactgttggacatttgggctggttccaagtcgttgctattgtgaatagtgctgcaataaacatacgtgtgcatgtgtctttataggagcatgatttatagtcctttgggtatctacccagtaatgggatggctgggtcaaatggtatttctagttctagatccctgaggaatcgccacactgacttccacaatggttgaactagttgacagtcccaccaacagtgtaaaagtgttcctatttctccacatcctctccagcacctgttctttcctgactttttaatgatcgccattctaactggtgtgagatggtatctcactgtggttttgatttgcatttctttgatggccagtgatggtgagcattttttcatgtgtcttttggctgcataaatgtcttgttttgagaagtgtctgttcacatcctttgcccactttttgatggggttgttgttttctggtaaatttgtttgagttcattgtagattctgtatattagccctttgtcagatgagtaggttgcgaaaattttctcccattttgtaggttgcctgttgactctgatggtaatttctttagctgtgcagaagctctttagtttaattagatcccatttctcaattttggcttttattgccattgcttttggtgttttagacatgaagtccttgcccatgcctatgtcctgaatggtaatgcctaggttttcttctagggtttttatggttttaggtctaacgtttaaattgttaatccattttcaattaattttctataaggtgtaaggaagggatccagtttcagctttctacatatggctagccagttttcccagcaccatttattaaacagggaatcctttccccattgcttatttttctcaggtttgccaaagatcagatagttgtagctatgcggcattatttctgagggctctgttctgttccattgatctatatctctgttttggtaccagtaccatgctgttttggttactgtagccttgtagtatagtatgaagtcaggtagcatgatgcctccagctttgttcttttggcttaggattgagttggcgatgtggcctcttttttggttccatgtgaactttaaagtagttttttccaattctctgaagaaagtcattggtagcttgatggggttggcattgaatctataaattaccttgggcagtatggccattttcatgatattgattcttcgtatccatgagcatggaatgttcttcccttttttgtatcctcctttatttcattgagcagtggtttgtagttctccttgaagaggtccttcacgtcccttgtaagttggattcctaggtattttattctctttgaagcaattgtgaatgggagttcatgcatgatttggctctctgtctgttgttggtgtataagaatgcttgtgatttttgtacattgattttgtatcctgagacattgctgaagttgcttatcagcttaaggagattttgggctgagacaatggggttttctaggtatacaatcatgtcatctgcaaacagggacaatttgacttcctcttttcctaattgaataccctttatttccttctcctgcctaattgccctggccagaacttccaacactatgttgaataggggtgttgagagagtgcatccctgtcttgtgccagttttcaaagggaatgcttccagtttttgcccattcagtatgatattggctgtgggtttgtcatagatagctcttattattttgagatacgtcacatcaatacctaatttattgagagtttttagcatgaagttttgttgaattttgtcaaaggccttttctgcagctattgagataatcatgtggtttttgtctttggttctgtttatatgctggattacatttattgatttgtgtatattgagccagccttgcatcccagggatgaagcccacttgatcatggtggataagctttttgatgcgctgctggattcggtttgccagtattttattgaggatttttgcattgatgttcatcaagaatatttgtctaaaattctcttttttggttgtgtctctgcccggctttggtatcaggatgatgctggcctcataaaatgagttagggaggattccctctttttctattgattggaatagtttcagaaggaatggtaccagttcttccttgtacctctggtagaattcggctgtgaatccatgtggtcctggactctttttgttggtaagctgttgattattgccacaatttcggagcctgttattggtctatccagagattcaacttcttcctggtttagtcttgggagggtgtatgtgtcgaggaatttatccatttcttctagattttcttctacatttatccatttcttctagatttctagtttatttgcatagaggtgtttttagtattctctgatggtagtttgtatttctgtggaatcggtgttgatatcccctttatcattttttattgcatctgtttgattcttctctcttttctttattagtcttgctagcggtctatcaattttgttgatgctttcaaaaaaccagctcctggattctttaatttttctgaagggtttcttgtgtctctatttccttcagttctgctctgattttagttatttcttgccttctgctagcttttgaatgtgtttgctcttgcttttctagttctttcaattgtgatattaggccgtcaatttttgttatttcttgctttctcttgtgggcatttagtgatataaatttccctctacacactgctttgaatgtgtcccagagattctggtatgttgtgtctttgttctcgttggtttcaaagaacttctttatttctgccttcatttcgttatgtccccagtagtcattcaggagcaggttgttcggtttccatgtagttgagtggttttgagtgagtttcttgatcctgagttctagtttgattgcactgtggtctgagagacagtttgttataatttctgttcttttacatttgctgaggagagctttacttccaactatgtggccaattttgggataggtgtggtgtggtgctgaaaaaaatgtatattctgttgatttggggtggagagttccgtagatgtctattagatccacttggtgcagagctgagttcaattcctgggtatccttgttaactttctgtctcgttgatctgtctaatgttgacaatggggtgttaacgtctcccattattatagtgtgggagtcaaagtctctttgtaggtctctctggacttgttttatgagtctgggtgctcctgtattgggtgcatatatatttaggatagttagctcttcttgttgaattgatccctttaacattatgtaatggccttctttgtctcttttgttctttgttggtttaaagtctgttttatcagagactaggattgcaacccctgcctttttttgttttccatttgcttggtagatcttcctccatccttttattttgagcctatgtgtgtctctgcacatgagatgggtttcctgaatacagcacactgatgggtcttgactctttatccaatttgccagtctctgtcttttaattggagcatttagtccgtttacatttaaaattaatatttttatgtgtgaatttgatcctgtcattatgatgttagctggttattttgctcgttagttgatgcagtgtctttgtagcttcgacagtctttacaatttggtgtgattttgcagtggctgataccggtttttcctttccatgtttagtgcttccttcaggagctcttttagggcaggcctggtggtgacaaaatctctcagcatttgcttgtctgtaaagtgttttatttctccttcacttatgaagcttagtttgggtggatatgaaattctgggttgaaaattcttttctttaagaatgttgaatattggctcccactctcttctggcttgtagagtttctgctgacaggtccgctgttagtctgatgggcttccctttgtggctaatctgacctttctctctggctgtccttaacattttttccttcatttcaattttggtgaatctgacaattatgtgtcttggagttgctctttttgaggagtatctttgtggcgttctctgtatttcctgaatctgaatgttggcctgccttacttgattggggaagttctcctggataatatcctgcagagtgttttccaacttggttccattctccccgtcactttcaggtacaccaatcagacgtagatttggccttttcacatagtcccatatttcttggaggcttttttcatttctttttattcttttttctctaaacttcccttctcgcttcatttcattcatttcatcttccatcactgataccctttcttccagttgattgcattggttcctgaggcttctgcattcttcacgtagttctggagccttggctttcagctgcatcagctcctttaagcagttctctgtattggttattctagttgtacattcgtctaaatttttttcaaagtttttaacttctttgcctttggtttgaatttcctcctgtagctgagagtagtttgatcatctgaagccttcttctctcaactcctgaaagtcattctctgtccagctttgtttcattgctggtgaggaactgcgttcctttggaggaggagaggccctctgctttttagagtttccagtttttctgctctgttttttctgcatctttgtggttttatcttcttttggtctttgatgatggtgttgtacatatgggtttttggtgtgtatgtcctttctgcttgttagttttccttctaacaggcaggaccctcagctgcagatctgttggagttttctagaggttcactccagaccctttttgcctgggtatcagcagcgatggctgcagaacagctgatttttgtgaaccgcgaatgctactgtctgatcgttcttctggaaattttgtctcagaggagtacccggctgtgtgaggtgtcagtctgcccctactggggggtgcctcccagttaggctgcttggggttcaggggtcaggaacccacttgaggaggcagtctgcctgttctcagatctccagctgtgtgctgggagaaccactgctctcttcaaagctgtcagacagggatatttaagtctgcagaagttactgctgtctttttgtttgtctgtgccctgcccctagaggtggagtctacagaggcaggcaggcctccttgagctttggtgggctccacccagttggagcttcccatctgctttgtttacctaagcaagcctgggcaatggcaggcgcccctcccccagcctcgctgccaccttgcagtttgatctcagactgctgtgctagcaatcagcgaggctccatgggcgtaggaccctccgagccaggtgcaggatataatctgctggtgtgacatttttaagcctgttggaaaagcacagtattagagtgggagtgacccgactttccaggtgccatctgtcacccctttctttgacttggaaagggaagtccctgaccccttgtgcttcctgagtgaggcaatgcctcaccctgcttcagctcgcacatggtgtgctgaacccactgtcctgcgcccactgtctggcactctctagtgaggtgaactcagtacctcagatggaaatgcagaaatcacctgtcttctgcgtcactcatgctgggagctgtagtccagagctcttcctatttggccttctcagctgcccgcctcagctgtgtaaactttcaaacctgatccaaccaatgtttgggccctatgtaaaccagccacctgctcctgaagccagtgtgtaaaatccattgcgcttcactgcaggctggaagtcccactgagaggcactgctctttctcagaagagaagactattctcctttctctttcttttgcctattaaaccactgctcctaaaccatcttcttgtgtgtccatgcactgatttccttggcattagatgacgaacctcgggtctttaccccacacaggtgatgccacttcagtatgttaaaactcattaatttattagttaaaattgctttattaataaatatagcactttttttttttgagacggagtctcactctgtcacccaggctggagtgcagtgacgtgatctcagcttactgcaacctccacctccctggttcaagcgattctactgtctcggcctcctgagtagctgggagtacaggcgtgtgccgccacgtccggctaatgttttctatttttagtagagacagggtttcatcgtgttagccaggatggtcttgatctcctgaccttgtaatccacctgacttgacctcccaaagtgctgggattgcaggcgggagacaccacgcatggcaaaatatagcacattttaaagaccactgatgcacagtgcaaaaactgccatatatgaatatgacatcaaattatacttccagtaacagtgttaggaaaggtcttgttaccctacactaactatttatgaatagtttaatggaatatgctgttttaaaaaatattttccattttggtatgtgaaaaaatggcatctcattatttatttatttatttatttatttatttatttatttatttatttttgagatagagtctcgctctgttggccaggctggagtgcagtggcatgatcttggctcactgaaacctctgtctcccgggctcaagcaattctcctgtctcagcatccctagtagctgtgattataggtgtgtgccaccacgcctggccaatttttgtatttctagtagagacaggtttacatcattttggccagggtagtctcaaattcctgaccttggcctcccaaagtactgggattacaggtatgagccaccgcgcttggtgacatctcattattttaatatgaattttagtaactattaggtaacttgtttttatatatgtttagtgtactactttttgaattgcctagtcatggcttctgcttattttgctattaaattatttaactttttactgatttatataagcttttgctatccacattatagtaataagttgtctaaaattattttacatgtatcttcattcagctcccagagtccatcttcaatgcttttgatagaaaaggagttcctcccttctaaagatgtctactcttagtttaaatatgtaccaattagtaatacacaattagggaagtttaaacactgtctaattaaatttgatttggggaaaataaatgttctcacctttccatttttatttaaccatgtgtaagaaggcagcctatacattctggggtaaaaagtctctttttaaaaagagaaaatgtattctatcaaagagggtaccaaattccaagtttgcactgcactttgctgaacaccttgtattttttcaagcttaaactttctaaaaggttagcagtattctctgtgaaacacagagctgctcacattgcagccctgctccaaaacatttggtggttcataacagcctgcaaagctgagcccccatccatgtttctaaggccaacatctcttaacatcccaaatctatacgacactcccaaagtatattcttttgtcaaactccacttcttgtcctaccctgtccttaaataagcctcatatttttatacttcatgtcctgtacttaaactgcttttttgcctagatgtacatttttcttttcccacattcttcttctccacatggaaaacgtgcacatttgtgagtatcacctttactctctactgcaacttctcacttgccagttctccacttgttcttgctggttgtaaggcactgatgaattttagaactggaaccatattatatccatctttgcagttctagagcctggtatcaggtgtaggtgtcaagaaatggttcccaatggaagcttgctgatagtgatcttcaacagatgagacaagaaaggagccagaatgctgatttactaatccagattactttccactattgttttgctgaaactctccaatgtcatgagaaaaataacaatgataataataatactagtagcaaatacagaagataagtcagttaaaattgagctggtagcatgcataacttcaattctgtatttattactggtttcaaaatattccttatccacaaattggaagaaacaggaaacagaccctcaagtgtctttcacaatgcaagacctgccaatttcataacttgctcagccaccctcataaaagaaactaggcacactggtgaccccatctcacacacactcaaaggagacagaaggtcttcctctcactgtcctccagtacatgtggctcctccttcttaaaaagcaaaacaacaaagaaataatacctcccagagggtatgacacttgaacttggacaagtgtttttttttttgttgtttttttttaagatggaatctcgctctgttgcccaggctggagtgcagtggtgggatcttggctcactgcaaggttcgcccacgccaattctcctgccttagcctcccgagtagctgggactacaggcgcctgccataacgcctggctaattttttagtatttttagtagagaccaggtttcaccgtgttagccaggatggtctcgatctcctgacctcgtgatccacctgcctcagcctcccaaagtgctgggattacagacgtgagccactgtgcccggcctgatcttcaagtttttagattcgattagtaatcaagtcaattcaatttttgcccttacttggctcatatcacatattatggacctcttaggatcactctatgcaaattctgaggcaaaaccttgagtttccatattatgtaaaataacagtaacctgttatgaaacaacagtagagctgttcttaaggcattgaccctgcccaaagcacaacttaatttcccaaacagttatgagtttagtttcaaaatctcttcaaaaataggcttcatatgagtctttgaacagggctcagcactttcagtgaggttaaaagtgggtgtccacaaggaaggtttcaagagataagaaagccccccattaatcaccacacagaggactagcagaatcatagagtccatgcccaccctttttcacttctagaatatctcccaccatgtgaaaaaccacctctcttccacatgctatccttttcaatgagaacatggtaaacatttcatcctcagcaggatttgttcagggtttcactctactttcccactgggtctcagtctgccagctttctgctttagtgtctttttgaactccccctctttaagggcacagaaatcctcatcagtcagttcatctactaatatgacctctgcaagcccctcactctacaaaacaccattcctgaccatcacagaagggaaggtctaacttatgtggtcaaatattagctaaaatgtgttgttcaataggtaagctgtaatttaattctggaaaccagacccctgtcctggcacacttacactttttccttggtgtgccaatcttttcccttgatgtgcctaatagggaggactctgaacacaggaggttttcagttagtatttgtttggtgaatggatcatgtctctatggtaggtagtctggcatgggtcaggagcacagccctggagacaaacttaatagtttgagttctaatagctggctgcctctctgggtctttatatcctcatctgaatcctgaggataataattacatctacacctctctgtcgaagaattgtgatgaatgaaaaagatgatgcataaagaaaaattaggatgctggtagctagctctcagtaattgttagatctgatgacatttgctcctactgctatcaagctgagtgtgtttctatgtataaaagctaacaaccaacaagctgagtgtgtttctatgtataaaaactaacaaccaacaaagggtgaaaattaaagtaaaacttgattgttaacttgtcagactggagtcctatggattaacaggtctagcacaggtagaagagaaagaaatacttaacttctggtttatttgatttaatgcaaatacaggaaaacctggataagaaatgcttttcaccaaagtttgtctgcaacttgaatgctgtaggttaaactaatttaaaagtactctagacagattcatttgtaatataagcatgtcatagtttctggtgtttaggactggatttatgtttatttagttttctgaagagacacaagagacagcccaagctgctatcggaattcctagagacaagttgggcaaatgagcccttacaaaattccatttatggtaaagataataatgaaataaataattactgagaccagctccatcagcgagaccctaacccagcagtgctagaggaattaaagacacactcacagaaggtgtgaagtgggaaatcggggtctcacagccttcagagctgagagcctcgaacagagatttacccacatatttattaacagcaagccaatcattagcattgtttctatagatattagattaactaaaagtatcccttatgagaaatgaagggatgggtcaaaataaagagatgggttgggctacgtatctgcagcaggagcatgtccttaaggcacagattgctcatgctgttgtttgtgggttttttttttaagagacagaaaaattttattaatgagtatgcatacaaataaacctagacaaccatgaagagtccctcacagtttcatgtattcacaatattatttcatctctaaagccatcagtgaacgactagttctgctacttgttaaagttgtgcaaaaattctcaatttaaacatacagtcttaattataccagtgttctaatgtcccaagactgattgtaggtaatggaatctcaacaatatcttaaataataatttaaaaaactcaatatgatctacaagactaatatatttaaaggaaaataattcacattcactaaattcctcccctttcttccttcttccctattctccctttcacttgccaatttttttctacagtatatgatgatggccaaattacccaatatcaactgtttcaaaaaagaaatgttattttagaagataccatacagcaagagacttataggtgtaacaccactgaaattatttactaagccctggccgggcatggtggcttacacctgcaattccaatactttgggaggttgagcaggcagatcacttgaggtcaggagttcaagaccaccctgggcaacatggtggaaccctgtctctactaaaaatacaaaaattaagtggacatggtggctatcccagctactcaggaggctgaggcaggagaactgcttgagcccgggaggcggaggttgcagtgagccaagattgtgccactacattctagcctggatgacagaaccagactctgtctcaaaagaaaaaaaaattatttaccaagctgtgttttcatagtgttttttaattctctgaactgcttcagtatctgcagtgttttttttacatttcaaagacttcccacatgtaacatttcattggaattaccactttacatcatagttgatatggaaattattacatctaacagatgaagaaaatgtagacataaagaaccattcgctctaatgtcatccagtgtaactgctaagagttaggattagactcaagtcctattcctaatcctgtatactaccctaaactcctaagcccccatacattgtacttcacagaatgctactagtgactgtgctcatgcattcaaacaagttttggaaatgttgtgttaagcaaagctaaccagattcccagagtctttattatgcatcataaatccccaggaaagatccagagtatagagcaggtgccataaagttaaaagtcccacaagtttcaagcaggtaacaaaggtgagcatgcaagggaaagtaaggacttggggattagaggatgcatccccatctagtggaagcctggtcacatagcaatccagcccaatcttgctgggtctttccagagaagctataaatcttggctttaatttcaaatctccagttttgtgcgtattgcctcaaatttaagaaaaaaaggcactatagtttaaaacaaataaaatttttgaccagatcgggccagccacatttgggaaaactgaaataccatgtatcataatctcatttgcccacagaattttccttcaaaggacttatacatttcctagaatgataacggtgttaaaaaatgttgcctctggctgggcgcagtggctcatgcctgtaatcccaacacttttgggaggtcaaggcaggtggctttcctgaggtcaggagttggagaccagcctggccaacatggtgaaaccccatctccactaaaaataaaaaataagctgggtgtggtggtgggcatctgtaatcccagctactcaggaggctgaggcaggagaatcacttgaacccgggaggcggaggttgcagtgagccaagattgtgccattgcatttcagcctgacaagagcaaaactacatctcaaaaaaacagaaatgaaaacaaacgttttcctctgaaagcaagcatcctgttaccccagacaactatggtatgggtagctctgaacctcaaccatgaattatttcagagttttttcaaactgaaattgaaattaatgcccagccttaactgttcatgtagaaatatttcttttctgacaaatctagctcttgcaaatctatgcttagtagagacggggtttctccatgttggtcaggctgttctcaaactcctgacctctagtgatccacccgcctcagccttccaaagtgctgggattagagcataagccaccatgcctggctggcaaatatatacttctaaacaattatgctgctttagtataattgttttttatatatttttgtactgattaaagatatccttacaataagtctaattgaattataaaaaaaaaattacaggaattgactagatatgagaaggacactttgcctttccaaaacaattttatctttctttttttttcttaaaattttttcttaatagagatggggtcttgccaagttgcccaggctggtctgaaatttctgggctcaagctatctgcacaccttgtcttcccaaagtgctgggattacaggcatgagtcatggcactagcctccaaatcaattttaaacataaaagtggtttggagacgatttagaatttgggtcaaaactagtgagtttcaaacacttatatctgcaatgtaacttataagtcagaaaaggcagccttttccctaccgcagcctttttttttctctcttttatttctgaccttcttggttctaaaaatttgttcagaaatcctgatggttgtttaaatgcttagcaccatgacacacatgtaatacaaattgcataaatggacggggcgtggtggctcatgcctgtgatcccagtaccctggaaggccaaggcaactggatcacctgaggtcaggagttcgagatcattctgtccaacatggtgaaaccctgtatctaccaaaaaaatacaaaaaattagctgagcatagtggcagacacctgtaatcccagctcgtgaggctgaggcaggagaatcgcttgaacccgggaggtggaggttacagtgagatgagatttcaccattgcaatccagcctgggcaacaagagcaaagctccatctcaaaaaaaaaaataatgtataaatatgttgaatcacctggcaaatgattttcttcccctggtgtctatgtgttccatactattgtagcctcttttaactggtaaaataactaccccaattcagagatccagtacttaatgcatcacatttccagagtcgtgagaaaacagctaaacctgttagagtgaattatactcactttgtttccccatagaggaaataaaacccacgattagaaacctttggaaaacataggaaatgcaacatttggaagtatatagaaacaagagataatcatgcaatgcttccaaatgaagtctcacattggatttgctgattttggagacagattcccctcttctggacagctttgatggccaagatagaagttcatttgctatgtttccagggactattctctttgatggatacaggatttatggggtctaaagagaacatacaattctaaagtgttcatgtttgagagaaaactctgcaatgatcagaaggattgagccagttttagcaaaacaaattaggactacattaatgatgaggttgactatacacagtttggagtgggagagttactctacccagtatcactgacatgttggaatgccagatgaaactgaaacagaaaaattgtcttggagtctaaaagacatctgatgtgctgatacctgttcagtcttctgcagtcatgggcgtaaactctcaaagagcaccactgggtcttagtccgtggcataaacattattctcaatgtagatattgtcttctgcttggacttcctttttaactgcattttgcaaagctttagtttgaagactgctaaatgaaacacttagttgttgagtctcctctttgaagaaatactttttggcaatgatgacacccaaaagagcaagaagcaccaagacagaaatacagactccagcacagattcctttagtggtgttgaccatctgtggactatatgctggggacagttgagtttgattgttattccaaaggccatctgaagactctgtcatggtgtcattcccatctgttgtgaaagagtgcaatggtgagctggtgggttgtgtccttatttctccctgaagtgtcatagggtgggtttctgctggctgaggtgaagatggtgaagtggctactgattgatggttctgcgtgggcaatggcgttggaggaacaaaggtagagaccattgttgtcattggaacacttgttttcattgaaatgctcgttgttgttggaacagtctttgtcgttggaacagttgttgtcgttggaacgcttgttgtcattggaacagtgatgctcgttcaaacagtagtggcggttggaacagttgtgacaattggtgtagtcgtgaccctgggtggcacaatctccaatgatagagtgattttcatgtcattgaaccacccactgtgctcaacatggcaacaatataagccactgtcagacacagctgtattttctatagtcaaagggacatcccttcttgaaaggtcccccaataccttatagtgtgtgtccttccgataggtgacgtgggttccattggtccagacaatgctatttcagcatgtgaataaagaacgtgcgcctctattccagcacatggatgtgacagctccattgtagtggcagggtagcgtgatagacggacctgccattccaccaacctttacagaaccagctacagaatctgccagatgtaggatgaggcttaagatggccacttcaggatacattatgggatcagccagttagttagaaggcagttttccagcttcttctccctcctcctagtctctgtttgtggacggctttaaatggttttccaccctgggtgggccaggtgttccttgccctcattctggtaaatgcacaacctcccagcatgggcattatggccatcatgtacatgtcacagtgctgcaaagattttgtttatggccagttttggggccagtttatggccagattttgggaggcctgttcccaacaaataataatctctgaacataagaatttgactagtgttaatcactccacttctccagtacactgatacttctccctttttcttagcataacacaaaacagatacatgactacacaccatctgctctccagtgcggaacagaggaacaaaggcataagcaagcttcagaacacagtcagccatgttcaccacatctatatctagcactgcttaaaacaaagtcaatgagaaactgagaagatgagtgactaccctattttcagcacttattgtcacaagaaaagaaaacatgcccacacactgtctccttctaaggcacagcatccactttcctgaggaaaaagtaactttacagcatatatctcaatctcacattattagcaagatgacactggctttgagcacacaaagaacaggcatattatagacactcttaagacacatcacatggcctggcttacctgatacaatttttaatttctctgaagtaaactcaaatttcaaacatgtatttctttattaacttatttcattaatttccacagggacttcacagaaagtatattcaactttcattcacttaatcttaccacaatagatggtgtaacatatccagaagacagccatatgtaagacatgctcataccccaaagcatagaaaacttaacacaacagggccttgaggaagcaacactataacagtgcaaatatacaaatatttaagaaaacctacatcacccaacaaagagcatgtatggtcaccactacccagcactctccaaaataagtagctatgaatagcttattcaaatttggcttatatatacttgtcaccacaaattggttctgaacatactgttccaattttggatattcacaacaagggtaattatctggtaagatatatttataataacttgtaattagattcctaaatgcacacatatacttgtgtcacagtgaggtgaaaaaaactctgagttatttgtagagtaccttaagatttaaatttccaaaaaacattcttaagcttagttttacaagtattccacccagcatctcttcagcaagctatttcaattttaaaaagtgaggactagggagggcttttaaaagttttatttctttctgttcagtttatcttatcccatacagaaatggaataaagtgtgatgtctgtcctaatgatatttatggttgtggtaatacagaaatatctatgcttccaagcaagaaatgaaaaattatggtttccccaaaatagagaaaccagtgctacctggggcccaaagagatgttcaggttacatctgtcagaattgataccatgcaagacaaccatctttggagaacagtggggctcacctgagattttggtgagtcatgtggatgacatcagagacaagcattacacaaaatgagcatcccaataagactttcatgtgagattgtcttagaagatggtggcccaactcacacagaagaggacggctgtgcatccaagagagactgatattttttctcaggagcagaaatcttaatgtaggagatggccactcactgagtagttgaggaatgccctgatggaactctctgggggtcagatttcacactgtctccctgagttgcataaagcacagaacagcatgcctgcactccagcttctagcatgtaccaactcagcagaaaacacatcactgtctattttgtttcaaaaatgctttgccatttaaaaaaagttaattaatatagtagaaacccaagaactacctaggggtagggagcatgtctgtcatcagaagtttttaaatgctggctagacaaacactctgtggaaataaatttcactctttgtgagaggggtaaaataaatctttttcttgggcactgacagatctagccaagatcctagtatacagcagataaacagcaacttctgtttactaaactttattttcacagattactggtgaagcaaaatattgatataactctaagacatgaagggtatcacaagaccactcatgttctttatgtggtttcaattaagaaatgaggtgaaaaatctggccatgaaatgagttttgatgctcctaagtagcatcagaactgctctgatgtgcttaagccattgtgacagtcctagctttgttcctacccaaagtctcttctcatgaatcctaggcttactggtcaaacagataaagcatccgtaaatcaaacacaaacttcaacgctcttaacatgtaggtgtacatctcatctgaaaatcattcaaaagctcaagccatctacaagaaatctttcctttgcattttagtatcaataaaaggaaagaaggaaaagaataggagaaagccatttaataattttcataggtaaaaatgtaacattggtttctcagttacataagtacttttcttgcttcatccatgacatacataatttttaaccaactaaaacacattacaagtagagaaatagctaaaatcatggaaagcatacacataactcttcaaagagtaggaaacattccctgttcatatgcattgcttaatccagcattccaatctcactgaggcaccagcatccacgctgttctctgaagcattctttttcctcctgtcacccatccttcagatattagctcaaatatcacttccatgggtcaccttccttaacctgcatcccggcatcctccattcctctcccatacaaaaaggccaaactttatgttggggtgatcagacccaacaccacatcgttggggtgacaaagtccgggggagtcaaaggattgagaaaaagacagagagaaaaaagtgggacaccagggggccatcattatcatggaggctgcaaaggcactgagctctgggagcccatggtattttttggtaatccagcaaagaaacaggtggtgagaatgtgggggtcaaaagagcaggcacatgatctacagctgtgacggtttagcatttatatggaacatgttctgctacttgagataatgggaataggggcctaggaaggctagaaacaaggagccagcaagtctagacacattccagaggacattatgcaagccctgtctcagtttccctcccaacacagctttttcccaacatgcccccttatcttttttgtaaaagagaaggtatcattattactagctatcattattactagcataaaaagtgccctcttttaattgagcaaggcgattgcaggctttgcagcccttaattgatggtgggtgatccagctttatttttcttagcctttattcaaactggagtcgctctggtttgaatgcttgccatatagctcccctttcccttttacataaggaccttaaccctaggggttgcagaaggatgaaggtccatcttctgtaacttcatgctgaatagaggtgatgatattcctgcctaactattagcatttcttgtattcacgacagagaggagctgagtcagaaagcattggtccattaagcgtcatgactctggtcggtcctcgttccatcttctcattcagattcgattgtctcatggctcatactggggaaacccgttccatggttggtatccatgtgtccctccagtctcccattccatggtcgtacacatcttgagggtgtccacatggtttgttcatctcctgcaaaaacaaaagcataccctcacccccacgttagtaaatctactgaaacagaagcaaaaattttgtggctgtagccaggaggccactgataatgagaaacaggctttttctgattaacagaaggtatagagaaagcaaatcgagacttttcaaaccttcaattctcactgtacaggtgggtccactagatgctgtggcttatgatagatcttcagatatttggtgggcacccacataggcacctgattgtcacctggagagacacaagcaaatccccttccccataaaattatctttaggcagggatcggaggaagtagactcagaggtaaggagaattttggggcctaatggcttcctgatgtttgataggtgttcctttggaagttaggaattccctttccatattgctgtgtgggcatggaggtctagctaagcataaagtttgtacatatatttaccctttttcattctcctaattctagtgtataatggctcctgcttttgctaggatgtctctccctaacaaaggtgtggggctttcaggcataattaaaaaggcttgtgaaaagagtcaagttccccagtcacaacttagtggctgggagaagtatctagtgactgcctgttctaggaccccttggatagtgacacatctggaggacagttgtccaggacaggagaataagactgagaagtccacacaagtgtccaagagacagttagcctcctggacctcaatggccaagcatacctggggagggtgatggcgtgggctggtgcttgccctgggcaccctcattcctgctgctggataatttggttagggcttctgacgcagaggacctttgtcccctggggcagtgggccttccagtgattcccttgacataaggggcatggacaaggaggtggcttatttctattcggacaatctttttaaaagggtccttgcagaccacactggaagcaagccctattaagcatttgattttcccagcctttcccttttccagagcctccaaagtctgcttgcctgagggtcatgactaaagctatggccttttctcgttgttgttagtttgtcccattctgcctgctcctcctgatctatagtataaaaaaaaacaaaaacaaaaacactgaggttgccaagttcaatagggtttctaagttttgttccgggcctaaggcggacttttgaagttttttctaaagcctgcagctgactgagtgataaacttgtcctttaagattagttggccttcaatagagtcaggtgacagagaggtatgctttctcaatgccaccctttgtctctccagaaaggcagtggggttttattcctttccctgtgttatagtggacatcattgaatactttataggcttcttcctagttttcctcagtccttctagcatgcaagttagcaaatgtctgtggcaccaatctccatgttctgatcctgcatcccaatgaaggtctacactgggaacttcctactggcctgtggggaattgttctctttcctctgttgtcatcctatcattgacctgactgagataccagagatcaccaaactctcgggctgcagttatggtggattagtgtctgatctagctgtaacatttatatctcactatgtcagatcaaaggattgtcctaacccttgtaaaacatcatggttatctgagaatttacctaggtctattttaatttgtttcaagtctgacaggaaaaaagttacataaactctgactgggctgaattctccagaatatatcttaggggtgtttttgccttggggagaacatttcccatctgaaaaaaagaacatagagatgacagaacccctagtcactttccactgagcattagtcctagagcatcctctatgtcctaatgcttattcctttccagggtgcataatacccatggacttctgcttattggattagttatgttcaccgatgtagcagtcctgcatctgttttctcacctttcttgaccacagagaaaggggtctgggctgctggattccagtggtcctttaccagcatgcccaacattgcctttgcactcaagaggtgagttctagagctgggctgggttcctatttgataacaacccagctgccccatcaagatgcactcccataaacagttcttatgtaaattaatttcagagagggtgtaggtaaacttttgagtcaggattgagataagagttgttttattctgaaagtactttaaggattggctgagtgcaaagagctcgcacgcttgagaggactaattattagataattttcctaactgcttctacaagagtttccctattgttcccccgacccccacctcaatcacccaggaggaaccatctgtcatcctgtcctggagggagttcctcctaggtctggtcagacctttgtatggtaattaagatttaaatacctcattaggaaatctgctgggttaagggaattttcagtggttaatgttaaatcaactttttctaacagaatagccccatactttaagattgagttagtaagctacctttttgctccttttactttggatagctctgaactggtgagatgtgctcacaatgaagtttcttctaaaagttatttttctcttttcttctgttagcaaagcagtggctgctaccgatggaatacatttgggccatctacaggttactggggttaaggattttgataagaaggctactggttgtcagtggtcttagtgcttttaggcaatgcccttgtttacactgacaacaatatagtattggagtgttatagggtcacggagaagaccattagttatcaattataggttttaaatttatcctggcttttaaaggaataagttacactgttttttctttaactacttacatctctctttctcctttgtagatggattttggaaacacagcggaaggacatttgcggtcctccctgctggattaaagttacaggaaattgccatgcttcaaggtcttcatctactctagccttttgaatataattttatatagcaccaccaattgctccaggttttaatgttgcaactacaggagcagtaagtctcatagctaattcatcttctcacccattaaggggagagagaggaggtggccttcacttaattgatcaggtggagccaatgggctagtaaaacatacttttttcagtttccctttcttttaatttctgtttcctgttcctcacattcagaatctgaagttagtttttacactcgtcctcctcttctttatctgaatctgcttcatcatgtgtttgaaatacctcaagagctgcttttattagcacccacattgaacaaaccaagactggaatttttgctccatctttatacactttttaaaaatctctgctaattctctcccattcctccaaagccatagtcccttgttccgggaactatggacaaaactgctttattgcactaaaaagtgagtgataacaaattctgagtactaactttcactccccctcttcgtaataagtgctttaagaaatttaaataagcagaatgctttcacgttgtcccatttttttaccctggttcttccaagccctcaactttcccgccgacgttcttttaaacgtcctcgggttacctttggcgatgcgtcctctgctttcacatgctctagtgttccttcaccggggtctttgtcaccccacattgggcgaccaggaatgttggggtgatcagacccaacaccaggtcatgggagtgacaaagtccagcagagtcaaaggactgagaaaaagactttgagagcgaaaaaggtgggacaccagggggccatcgctaattgaggaggctgcgaaggccctgagctctgggaacccaccgattttattggtaatccaacaaagaaacaggtggtgagaacgtggaggtcaaaagggtgggcccattatctacagttgtgacggtttagcatttatatgtaacatgttctactacttgagataatgggaatggagcctaggaaggctagaagcaaggagccagcaagtctagtcacatttcagaggactttatgcaagtcctgcctcagtttgcctcccaacactcagctttttcccaacaactttacttcttacaacaacttatcatgggaatggtaaatttggtggtgaaaaactgtctcttttctaaaagaaggctaaatctgaatcagaattgtacttaggaaaattaagttgtgaaactttaagaagcttttgaacacaaaatggttcttagaaaacttattttcataatttaaatacacatcaaattcagagaaacacaagttaagcatcctttaagttactcttggtttaaaacttttaagtagaatattttaaccacatacatattcatttaactaaacaaggaggagggcaggacaaaggtcagaccagtggcactgtatggctaaaagatcacacctttcattatactagacagtttttgtctgaggcctggggtcccagaacataaaaatgatcactgtctcctttattgcttccctgtattatccccatccttctcagccagggcagctgactgacatccaccttctcaagaggacatgcaaggacagaagacgtggctcagaaacactgctctatgaaaagggcagatagttatgtaagaattttgtaaaaacatgagtttttaatgaatgcaaaaacatgaactgtcaagcaagtaagagctgttcaaacaatttttttttttttggaggggggagacggagttttgctctcttgttgcccaggctggagtgcagtggtgtgatcttggctcactgcaacctcttcctcctgggttcaagcaattctcctccctcagcctcctgagtagctgggattacaggcgcatgccaccacggccagctaattttttgtatttttagtaaagacgaggtttcatcatgttggccaggctggtcttgaactcctgacctcaggtgctctacctgtcttggtctcccaaagtgcagggattacaggcatgagtcaccatgcctgtctgtcaaacaattttttaaaaagatatactccacataacttaaaacatgagggagactggcagatgacagcatcagagcgagtttccttaataactgaggaggtgattgggaaaactgagccatctaccaaaatagctttacagaaccaatgcatctcatttgttgtagaagctgatgagttctagagctcttatttactatggagttttcaaatacattgaacaccacttaatgttttcctcaatcccaagcttcttgtaaaactttcacgttgccaaccatggcatcttagaggcaaataaaagcttacctactttatggaatttcagatttctaaaaatagcacatgcaatacaagtcatgcacccagtatgcttgtggatgttttaaaggccactactataccttccaagcaggcttccttgacttcagctctgctgacatctgtggctgttctgtgcattgtaatatgcggagcagcatttctaatgtctgtgcactaaaggccggtagcatccttccccaacacaagacattcaaaattccggaaaggaaatccacagtggatgcccacgaagcttcctaatctcaaaatataacacttgattacatatgtaggttttgagtttctggaacatgtattttatccttacaactatcccatgaggtagaaaatctactgaaaagatgcctatcatcgtagtcagcaatgacaatgccaccaaaggctaaagtttcattttaaattcctttataccttcaaattcaataaaattttgaaaaaaagatcttctttattaaaaataacaacacacacacagaggtaaataagcagtatacatttaaagctacattttttttagatcaagttgactctataaagcagtttttccatggagctaggggtagttatgcattgtggatcctgaggttaatttatttccagctctgggcatatcataaagcagctatcaaataggtcaacatacccacccaaccctaatagtgttactctgagtataaacatggaatctttgctgaatggtttcaaaaaagcagggtgaaaataacttagtccaagaagatacatcaaaataaataaggaacatttttaagtaattaaaccaccggaaatatcacacattttatgtaatcttatcccattgtctctgaggaaagggaaaaaagagaaagtacaaagccagctagagaaagacaaatacagcttttaaaagctctaattaaccccactaagaaatttttttggctacctggagtacgcaggcactgtataatgtagggcagttgtccccaacctttttggcactagggtctggttttgcagaagacaggtttttcacatatgtggtgggacggttttcttttggaataattcaagcacactacatttgttgtgcactttctttctattattacattgtaatgtataatgaaataattatgcaactcaccataatgtagaatcagtgagagccctgggattgttctcctgcaactagatgttcccatctggtggtgatgagagacagtaacaaatccttaggcattagattctcataaatagtgtgcaacctacatccctcacatgtgcagttcacaatagggtctgcactcctaggataatctaatgctgccactgatctgtaatatgaacaatggggagtggctgtgaatactgatgaagcttcgctcactcactgttcatctcctgttgtgcagcctggtttataacaggccacagactggtatctgtctgtgccctgggtgttgggggccccgatgtagggcaattacatttattcatttatttattgagtgcaatggcatgatcctggctcactgcaattttcaacttccaggttcaagcaattctcctgcctcagcctccccagtagctgtgattacaggcatgaaccactatgcccggttaattttgtatttttactagagatggagtttcaccatgttggccaggctggtctcaaactcctggcctcaggtaatccactcatctcagcctcccaaaatgctgggattacaggcacaagccaccatgcctggctggcaactacatttattaccatccatttattaccagggcacctatgttgtacagtgcctggcacacaacaggtagccaataaacagctattgatctaatgcaggaataataaagtaaggtttattttttctcctttaacatgctgtagttgtgtcagatgttaataagacctccggagtctgcctgaagtaacataaaacaaaagacccattcatcaaacaatcacctggaccccctaacttgttacaagttaggtatgaatgtaccacctgtaccagcttagtgagatgaatgtttaccatcacataacaaatacttgtttgccacgctaagggcttagagtttgaatttctgatgagaaataaagtggcatgtacaaaaccccagagaatgatattccatatatccataagcatcagtagcatatcttaaaagtctcacacatccagcaaatcctttaaaaacaagatatcctaatatgcagccagtttagcaattttttttttttttcagagtctctctctgtcacccaggctggagtacagtgatgctagatgggctcactgcaagctccgcctcctgggttcacgccattctcctgcctcagcctccctagtagctgggactacaggcgcccgccacaacgcccggctaattttttgcgtgtgtgttttttagtagagacggggtttcactgtgttagccaggatggtctcgatctcctgacctcatgatccgccagcctcggcctcccaaagtgctgggattacaggcgtgagccaccgtgcccggccagcaatatttttaagaatgataagacagtgcagcttcatttacctgaaatggagcacaagttctttttgaaggaattcatacccattcctgcaaaagttctgtggtctcttgaaggtagcacagaactaagcgtttttttgtgtgtgtgtttccaaagaggttttagccaagattttagtctctaacagactccctgattaaaatatggcttagaaactatacctgcctacttgaaaaagcatcaaatctacagaatacttttcacggatgtacaaaaatgaaaacaaaataacattctactttttgcaattcactttttctcaccttccacttctcttaaatatacttcagaatcattatgcacaggtgcagagaccactacatatctaaaaaaggagaaaaccctcaaatatttggggatggactggcaatattgccttgcagaaataattttgtttccttcagacagaaatgtctcactattttcagcattcttacctaacaggcaaattttgtttccattgactttgaaagggctaagcttaaatctaaactcttaaacaagaatgaagtttaaattttttattaatgaaaatcccagacaggtttttccaaatctttatatatttatatataaacgtaacaaatctttatatatttttttgaaaaggtggcttatttttttaattttattattattatactttaagtttcagggtacactgcacagtgtgcaggtttgttacatatgtatatatgtgccatgttggtgtgctgcactcattaactcgtcatttagcattaggtatatctcctaatgctatccctcccccttcccccctctccaccacagtccctggtgtgtgatgttccccttcctgtgtccaagtgttctcactgttcaattcccatctatgagtgagaatatgtggtgtttggttttttgtccttgcaatagtttgctgagaatgatggtttccagcttcatccatgtccctacaaaggacatgaactcataattttttatggctgcatagtattccatggtgtatatgtgccacattttcttaatccagtctatcattgttggacatttgggaagaacctgcattgccaagtcaatcctaagccaaaagaacaaagctggagtcatcacgctacctgacttcaaactatactacaaggctacagtaaccaaaacagcatggtactggtatcaaaacagagatatagaccaatggaacagaacagagacctcagaaataatgccacatatccacaaccatctgatctttgacaaacctgacaaaaacaagaaatggggaaaggattccctatttaataaatgatgctaggaaaacaagctagccatatgtagaaagctgaaacttgatcccttccttacaccttatacaaaaattaattcaaggtggattaaagacttaaacgttagacctaaaaccataaaagccctagaagaaaacctaggcaataccattcaggacataggcatgggcaaggacttcatgtctaaaacaccaaaagcaatggcaacaaaagccaaaattgagaaatgggatctaattaaattaaagagcttctgcacagctaaagaaactaccatcagagtgaacaggcaacctacagaatgggagaaaatttttgcaatctactcatctgataaagagctaatatccagaatctacaatgaactcaaacaaatttacaagtaaaaaagaacaaccccatcaaaaagtgggcaaaggatgtgaacagacacttctcaaaagaagacatttatgcagccaaaaaacacatgaaaaactgctcctcatcactggtcattagagaaatgcaaatcgaaaccataatgagataccatctcacactagttagaatggcgatcattaaaaagtcaggaaacaacaggtgctggagaggatgtggagaaataggaacacttttacactgttggtgggactgtaaactagttcaaccattgtggaagtcagtgtggcaattcctcaggggtctagaactagaaataccatttgacccagccattccattacgggatatatacccaaaggattataaatcatgctgctataaagacacatgcacatgtatgtttattgcagctctattcacaatagcaaagacttggaaccaaatctttatattttttattcacccttctctctctctccacaaccactaacataaccacccacaaaagaagaagacaatcccttcaatgttccccgaatgtgtgctgctgctagctcggaagctctgtagagttttgtaacggagtgtgaactgctggcctggatctcctaaccagtaaggagagagggaggacaaatccgctgagcaggtaaaaattctttcctcctcgttataatctttcatggattcagcactgaggagagtggccagggcatggggcccgtgcaaagtggcccaatggccagcacgttctgcaccgagcagggtccccacgccctgcatatctccgccctgcctggaaaggaagtggtcccgccaggcagtggaatcggccgctgtgccccatcctcactctgggccagggaatgggtcacatcctcgatgtgccctcggcccagaaaacgcgccgcttcgcaaggagggcgtcggcaactggaatgacatcccctactccttagtaaacattagggtcgcagtttcctaacagacatgagtgggatggggagaggggtcccaggcagaggctggtgctgggggcagaggaaaccacagtaggatgagggccggtgtgggaggaggaagggaagccccggaactgctacaaattttttcagcgggagaaggtcctccgcctttttccaggactcacgaggcacctggcaccgagcccccgactcgcacaaggaaggtgaactccacactgatggatccctgtaaaacacgcacctgtccaatggaagggcgaggaacgatcggcgcccccatggcaagtccctgacacccttctttcctgtgtgccttaggtggtagtcggccacaacacaaccgccagccaggaaaaggccagggtgcggggatgcccgctgccccctcgacgccagtgtcctctgcccaggaagatcaaatccgcagagcagggtgcgacaggggcttccaccaaataccttggcgagagcaccccaggaggccacctcacggctggcacccccaatgctttgcggctgcaggggaaagcaggagccctagtttccaggattccctgccagaaagggcctggaaggaccacagaaggaaagttcctcattccacaggggaaggatgccgggagacagagggcagaaagtggtgggcagcgttgggaagatgtttctggcattcaaggcttgcaccttctgagtcctggtggtgctgtagcaaatgaattcaccccgctattccgggaggccaaggcaggtggagcattcgagcccagaaatttcaaatcagcctgggcaacgtggtcagacgccgtcactacaaaaaacatttagtcaggtgtgatgggccacgcctgtattcccagctactcgggaggctgaggtgagaggatctcttgagactacagtgagtcataatcttgtgccactgcacttcagcctaggtgacggagcaagaccctttatcaaaaaataaataaataaacaactatataaataaactcagccacgggggttgggcccgattcctatcctccacaagctaatatagatacacattaggttttgctagtgcagcgctgcagaagctgccactatgtgtgctggatgctgattggcatgaccagtggctctgtaagaggaggagtagcagtggaggagtggagatagaggaagaggaaaaaagaaggggagaagaaaaggagaagaggaaaaggaggagagaaaatgggaggagaaaatgagaagaacaagaggagaggaggagaaaatgagaaaaagatagtaagaatagaggaagtggagaaaaaaaaacatcagaaggggacaatgggaccaggagaagagacgaggaaaaggaagctgggacaacgagaggagaaggaaaagataatgaggaggaggaaaagaggaggactaagaggagaggtggagagaaaaaggagggaaggaggaagaggagtaggagaggaagaggagcaggaggatgggagaagtatgaagagaaaatgaataaggaagcgaaggaggagaggaagagatgagaaggacgagaggaggaggaagaggaaagaagaaagaggagaggaggaaagaagaaagaggagaggaggagcagagaagaggaggaggataaaaaggagaagggtaggagaagagaaggaggagaagagtgagaaaaggaggaagacaggacgaggaggagcagaggaggaagtaaagagggaagaaggagagaaggagaagaagagacaggaaaaggggaggaggaggggagggggagaagaagacgagaaggaggaggagaggaaaaggagaagcaggaaaagagatggaggagaagaggaaaggaaaagaaggagaagatgaggagaagagaagaggaggaagagcaggagatgagaaggagaagaaaaggaggagaggaagaggagaagaaaggtgagaggaaaaaagaggagtagaagaggagaaggtggaggaggagagaaggaggaagaggaggagaaggaggagaggaggagcagagaaggaggaggagagaaggaatggaggaagaataggagagaagtaggaggagggaaaagaagaaggaggggaggatgagaggagaaggaggaggaacaggagaagaggagacagagaggaggaaaagaaggaaaggaagaggagatgcaggaggaaaaagaaggaaaggaggaggagaaggtagacgaggagaggagaaagaggaagagaaaatgaggagaagtagaaggaggtgaggaggaggagagaaggagaaaaggggaggagaatggggggattaggagaggagaaaaaggagaaggagagtagaaaaaggagtaggaggagaacaggagaaggaggaggaggaaaaagagtaggagaggagaaggaggaggagtggaggaggaagaggaagaggagacaaggagaaggaggagagcaggaggaagagaggaaaaggagtggaggaggaagaggagatgaagagaggaagagaaggaggaggaaggaggaagaggagaggagaaggaagagtaggaggagaaaaggagaggaggaagaggagaaggaggaggagatgaggaggaagaaaaggaaagaaagaagaggaggagaggagaagaaggaggagttgaggaggagaggagtcagagaaggagtaggagaggaggcaaagtaaaagattggtagtaggaggaaaggtttagggggaaaaggagaggagcagaatcaggaggaaaagaggaggagatggggaggaacagagtaggagatgagaaaaaggaggaggagaagagaaggaggagaaagacaagagcaggagatgagaaggaggaacagagtaggagatgagaaaaaggaggaggggaagaggagaaggaggaggaggatgagagcaggagaggagaaggacaaggagaggagatgaaggagaaataaagtagaaggagggagaggagaaaaagagtaggaggagaagcagaggagcaggagataaaggataaaatgagaggaggaggagaaatagaggagaagcagaggagcaggagataaaggataaaatgagaggaggaggagaaatagaggagaaccagtggagaaggaggaggatgacaggaggaggaagaggcaatggagaagaggagaggaggagaagaggagaagggggaggaactgtggaggaggaggaggagaggagaaggaggatgggagaaggaggaggggagaaggaggagaagaagacaagtaggagaaggagagaaggaggaggaggaaaagaaaaggaagagggggaaaggagaaggaggaggagaggaggagtagaggaggaagaggagaggaggaggaggagagaaagatgagaggaagaaaaggagaggaggatgaagagagaaagaggagaaaatgaggagaggaggaagaggaggagacagaggagaaaaagggggaggggagaggagtaagagaggaggaggagaggacaaggatgagaggaggagcagaagaggaagaggaaaggaggagatggaaaggaggaagagaaaaggagaagaagatgaaaaaagccatcactttgtggtgtttagtaattatgactattttcatggcttttggattaaagtttaaattcaataggagagatgagcacacagatccagattatttcagagctcaatttcagagctaaaggaaaagatatgtggtaatacacctgtggacgttgccaatgcaaaacagttgcattattttggtttgggatcaagccatatgtctccatacacaatgtatgtagtgcctaggagagagaagagtgcttggcccagtgatacattgcaatctcttcttggtcagagcccaaacatcacctaagttctaggtccagcaatacatcacaatactttctgagatgaagaccaaagcaggagagccacatcacctaggtaagagccctagaggtatggcacaatgccttctgtgggtaaggctcaggaagaagaggaaagttacataacctaggagctacagccagctatatgtcacaatcaccccaaggggcagggacgatgcatgagaggagggtcacataaagtaggtgctgagcaaagcaatatgtaacaatcagaggagagtgtcatctcctacttgctggaccatgagatatgttacaacatcccctttgggcaaatcccaggtaagagaagagatttgcatcaattaattgatgggctaagagatacttcgcaatgtcccctgtagaaagagactaggagaaataaataagattccctgtgtgctgggcccagggataagtcactttttcatctgtgggcatggcccaggtaggagaggagagtcatatcatttagatgctgggcacagagatatgtaacaatctcttctataagcaaaaccgtggtaagaaaagaaagacacataaaatattttatggacccagagatatgtcacaatgctctctcttgacagagtcaaggcaagaatgtcacatcaccttggtcctgggccccgctataggtcacaatgccttctgaaggcagggtcaaggcaaataagtaacatcttggagctgggtccagtatatatgtaacagtctcccctgtgggcagaacctaggaagaagagaagtgtcacattagctaggtgttgagctcagggatatgtcaccatccctcctgtgagcagaaaccaggcaagagatgagagtacattacctgggtgaggagtgcagagagatgccacaatccccactttaggctgggcccaggcagaaaagtcacatcacctgggtgttaaaatgagcaatatttcacaatgccccttgtgggcagcaccaaggtaggagagaaaacttacgtcacctgagtgcaagtcccagcgatatgtcactatgccttttgtaagaagcaccaaggcttgagaatagagtcatctcatctaggtgctgggtccagcaatatatcatgattctatttgtgaagtgagcccaggcaggagagtcaaatcaggtatttgacaggggcatatgtcaaaatcacaccttcaaaaaaattcagggatgagattaccaatccctcacatgtcctgtttctaggtctgagagtcaacatgtcttgtatgtttggtgaagtacatgagtcaaaatctcaactgtgaactggatctgtgcagcagcttctcaatgttttttgggcattatgccccttagataagtcataaccagccatgtgtgctaaattttggtttgagggtcaccaaatccatgcataacaaatccatgtatgagagtcaacattgcaactcttgactgcctctagatataagatttaaatcctcaacagtgggccacattcatgtgagaggacaacaatctttactcttgactgtctgcttactagtgttacaatctcacctttgagctgggctctgttagtacctatctgtaccacccaaagaatttatgagatacatagtttggctctatgtcctcacccaaatctcatctacaattgtaatctccacgtgtcaggggaggaaggtaattatatcatggggcagtttcccccatgctgttttcatgatagtgagtgagttctcaggagatctgatggttttataagtgttggaagttcctccttcattcactttctctctcctgccaccttgtgaagaaggtctctgcttccccttctgccatgatagcaagtttcctgaggcctccccagccatgtggaactgtgagctaattaaacctcttttctacataaattacctggtcttgaggagttctttatagcagtgtgaaaatgaactaatacaatatgatatgcaagagagttgcaaactgcattaagacctttatgccgatatgaacacatgattgtacgtgtcactctaagctcaggtgtgagagttaacacctccccagttggctgggtctaaatagaaaaggactcatctgcctataagctgggtttagaaaggggtcactatcccatatgtggccagatgttcacatatgactgacacaattccatctatagactgtgtcttcatgtgagattcaggatctcaccagtgggttgcgtccatgggtgaggatgactatcttaaggattggcagggtgtgcataccagaaatacaatagttcctgtgtccttggacctgtgatgatactctctgtaccacttgagggctttatacaatatgcaagagagaggtaaacctctgtgacctttatacaaagaagacacccaggatcttacctttttccctaagcctagctattacagacattatctttcttattggctagttcaaggtatgagaatgatcatcacacctgtaagctgggccaagatatatgtcacaatccctcctatggattaggagtaagcaggagagtaacattacctggatttggggccagttgtatgtggcaatcttctctaagggctcagtaatatgtcacaatgatctatgtattcaagacccagtcaaaagggcctcatcaccttgttgtggggtccagtgatatgtcataatcttttctgttaggagggtccaggcagaaaagaagtcacatttcctaggtagtgtatgcagatatatgtcacaaggccccctatggggagggtctaggcaggagcctcttattttctaggtgttggaccctgcattattttgcaatacaccaaatatttggggcctgggagaaaggagtcacatcacataggtgctgggccaagttatatgttaaaaaatatggtataatacccctgtgggcagggatcatgcagaaaagttgcatctcatagttgttaagataggccacatgtcacaatacacaatttatgctgagctcaggcaggagaaaagaataacatttacctatgtgctgggctaagtgatacatcacaatacctccttggtcagagcccacaaaatagaagagagttacctcacctaggtgctgagtccatcaatatgtcacaatactcactgaggaaagggccaaagaataagaattcattatttttggcgaagggcccagagctatgtaccaatgctccttgtaggtagggcttaggaaaaaagaagagagtcacacaacctgtcacgtaacctagacagatgagaccagctctatgtcaaaattaaaacgggtgtaagagtccgggcatgagaggagaatcacatcacataaatgttgggtgaaagaatatgtcacaatctagatagtggtgccagagatatgttgcagtgacccctgtgggcaatgagcaggcagtagaatcacatcacctgtgtgtagggcctagtgataattcactctaacttctgtgggcataacacaggcaaacaaggagagtcacaacacctaggtgctggtatcagagacatgtcacaatctcttctaatggcaaagcccaagtaagtgagaagagtcacatcaagtagttcattaacttagagatatgtcacaatgctccctgtgggcagggtccagacaagagactcacatcatcttagtgctgagcccagcaaaatatcacaaagctttctgaagtaaggaccaaggcaacagtgtaacatcaccttactgttgggtccagagacatgtcacaacctctcctgcagacagaacctaaaacgaatagaagagtcacatcaactcaatgctgggcccaatgttgagtcacaatatttcccatgagcagagatcaggcagaagtgagtcatatcatgtgggtaatgggtgcagagatgtcacagtgcctcctgtaggcagggatcaggcaggagagttacatcacctgggttttggacacagtaatatatcacaatgggccatttgggcagtgtacaggcaggagaatcacataacctgggtgtggggcccagtgatatgtcacaatgccttctgtgcacagtgacaaaagagaagggtagactcacattaactgaatataaggcctagtgacagtgatatgtcaaaatgctgtctgtgggcagtgccaaggcagtggactagagtctcatcatgaaggtactgggtttagcaatatgtcaaaattccatctgtgtgatgggcacaggcagaagggtcaaagcacttagttgctggacagaggtgtacgtcacacaatctcacatgcagaacgatacagggataagattaaaattcttgcgcatgacccatttctaagtatgggagtcaacatctctatgttgggtctaagtacatgagtcacaatctcttttttttttcttttcttttttttttttttttgagatgggatgtctctctgttgcccaggctggagtgcagtggcatgatctcagctttcggcaacctccacctcccaggttcatgcgattctcctgtatcagcctcctgagtagctgggactacaggtgcacgccaccacaccaggttaatctttgtatttttagtagagagggggttttgccatattggtcatgctggtctcaaactcctgacctcaggtgatctacccgcctcagcctcccaaagtgttaggattacaggcatgagccaccacacctggccaagtcacaatcttaatggactaggtctttgcatgagaagctcactttcttctgtgcactatgcctccttagtagagtcgcagcctcacaggtgtgctgaatcttggtctgagagtcagcaacccacttgtggactggatctacttgtaagaacaactttttcaagtttcgattatctccaaatgtgacattcagaacctcaaaagttggccgtgttcatgtggcagtatgacaatctttattgtcaactggatgtgcatacaagtgttaaaatctcacctgggctgtgccttgtcaggaaactctttgtagcacctgaggtctttatgcatgagagtctcaatatgatcagaggcctccctgctggtgggagccatggttataatttttaccaaacctctttgagagtcaacttctctccaattgggtgggtccaaataaaagtttccttacctaccaatgaactaggtttagaaatgagttaccatcaactgtagcatatgacagaaacaattccagctgtggactatgtcaacctgtgagattcaggatctcacctgcaggctctgtccacgtggaagggtgaaaatcctgatggatagtaggctgagaaacacaaactcatttggatgctggggtctgtgatggcattttgttccacactagggctttatatagtgtgtgagaaagtggcaattttctataccttcatacaaagaagagacatgggatcttgcccatttctctaatcccagctaaaacagacagtaacttttctattggctggtgtgtggtatgagagtcgccattccaactgctggctggaccaagatatatgtcacagtcttacctgtaggtaggaagcaaacatgagggtcacatcacctgtgttctgggccaggaatatatcacaatattccctgacacaagggaccaggcagaagagtcacatcacctgggtattcagccaggaatatgttacaatcccctcctgaaagcagggtgcaggctgcagagtcacatcacctctttaatgggcccagctttgtgtcaaaattctttctgtgggcaaggcccaattacaagagactcatcatctgtttgcttaggccagcaatatgtcacagtctttcctgtaggcagtgtgcaggcacaagaagacagccacatcagagatatgtcaccaggtccactgtggacggccccaggcaggagccttccattttctaggtattgggcccagcgatatgtcatgatactcaaaacatgtggggaccaggcaaaaaaaaaaaaaaaaagagagagagagactcacctcaccttgatgctgggtcaagtgatgtgtcacagtcttctctggcaggtcccaggcaacaaaaatgtgtcacatctcctaggtactgaacaaagagtatcatctaatacccctgtcttcagggctcatgaagaagggtcacatcacctacttgttgggtgcagccatatattactatacacaatgaatgctgggcccatgcaggagaagagagtaacatcccctaggtgctgcgtccaggtatacatcgcaatggctccttgagcagagcccaagaagtagagaagagtcacattacttaggtgccaggtacaacaatttttcacaatacttccagaaaggcctaggcagaagtgtcacatcatcttggtgaggtgacaagaaatatggggcaatgaccctggtgggtagggctagaaaaaaagagatgcatcacataatgtagggtcagtgctcatttatctgtcacagtctcaccagtgggcagggctcaggcaagagtggagagtaatattatgtaggtactgcagcaagcagtatgtcacaatttctaccgtggacaggtccaagacagaaaacgagaatcaaatcacataggtcatgggcccagaaatatgtcacagtggcccttgtgagcaacaaccaggcaaaagaatgacattgcttgtgtgctgggcccagtgataattcattattccttctgtgggtctggcacagggaagaggagagttacaacacctagctgtttggcccagaaatatgtcactatctcttctatgtcactatctcttcaaagtccacataaaacagcagagtcacatcacataattgatgcagccacagatatgtcataatgccttctgttggcagggcccattcaagagagtcataacatctagatgttggacccagccatatgtcataacacagaatgtattccaggcttaggcaagaaatgatagtcacatcagttaggtcttggacccatggaaacattaaaattttttattgagcaaaggctaagtagcagaggagagtcacacctcctaggctttaggtccagcaatatcttgcaatgacccctaagaggatgacccaggtaaaagggtaacatcatctatgtgagaggtctagaaatatgtcccaatctctgtgtgggtaaagaacaaaatgaagagggaagttatataacctaataggtgggctgatctatgtgtcccaatcactctagtggcaagagctcaaacatggaaggagagtcacacacataggtgccgaatattttgcaatacagaatgtgtgcagagcccagaaaggagaggacagtcacatcacctaggtgttgtgcccagcaatacattgcaatctcttttagggcaaagcccaaacagtagaggtaatccttgttgctggacccaaaaatatggcataacacaccctgaaaaagggcccaggcagaagaatcacatcgcctcaggagggttccaagaatatgtcaaaaggcctactgtgggtaaggctcaggaagaagagaagagaaaagtaacctaggggctggggccagccatatgttacaacaacctcagtgagcagggcccaggcatgagaggagggtcacataatgtagatgatgtgccaagtgatatgtcataactcacactgtggacaggtctctagaaataaaggtgagtcacataatctggttgatggtcacagagatacatcacaatgtatttatctcttgtcctcatgggcaggaaccaggcagaagaatcacatctcctctgggctgtgtccagggataatttactctcccttctgtgaccagagcccaggaagaaaaggagagtcacattatctagttggtggggccagagatatgtcacaatgtcacctgttggcaaatatgaagtaagagaggagagtaacatcaaatagatgatgggtccagaaatatgtcacaattccccctgtaggcagaatctaggcaggagactcacatcacctgggttttagacctagaaatatgtcacaagatgcaatttgggcaatgccaagacagaagaataaaaaacatataccctaggtgctaggtgcagaagtatgtaacaattccatgtgaccttcctggacctaacacatagggtatatgtctttattgtgacatccttactcaggtgcttggaagaagtgtatgtcacaatcagagctgcaggtaggttcaaggataagactaaaaatcctacacatgtccctatttgggtatgagagcaaacacctcttctatgttgggtctgagtacaaaattcacaatatcaacagtggactgaatttgttcatgagaacttcaatcccttctgtggaccgtatcttattcatggagtaatagcctcataggtgagttgaatcttagtctgaaatacaccaacccacctgtgaattacatcgtagtatgagtcaattatccaacttataacttcctcctaatgtgagattcagaacctcagcagtaaactgaattcacaaatgcaagaatgaaaatctttactaagagctttgtgtgcataagagtgtcacaatctcacctgggctagagatatattacaatcccctcctgaaagcaggtcacggacagcaaagtcacctcaccttgatgctgagccagcagtaaattacaatgttctctgttagcaaggaacatgaaggagagacacatcacctgggcttttgggcccagtaatatctcacaatctcccctgagggaagaacatacaaagaagaagagtcacgtcagccaggtgttgcgttagtcataggtaacaataccccctgtgagcaggaaccaggcagggaagtgagtcccaaaaatgtcccctttaggcagtgccaaggcaggataatagagtcacataacctaggtgctggatccaacaataagtcacaatcctgtacgtgggctgggcccagactataggtcaaatcactcaggtgctggccagaggcatatatcacatttacacctgcaggaaggtcataaaatgatatttacaatccagcacatgtcctgtttctaagtatgtgagttaacacctcatgtatcttagatgtaagtacctgagttaatctcaacaataaactgtatctgtgcatgagaggcacaatccttcctgtgtgctgttttatctgagtgaagttacagcctcacaggtgagctgaatattggtcttagagtcaccaaccttgtggaccagattcacatataaaagtcaattttccaatgtttgacagctttgggttgtgaaatccagagccttaacaatgggctgtgttcatgtgggaagatgacaatcttttctgtcgacttggtgagtgtcacaatctcacctatgtatcgccctagggctttatacctgatgcatgagattctcaatcttctctgagacatttatgctggtatggatcatgattgtacctgtggccttaagtccaagcatgagaatcaacatctctccaattagccgagtccagaatgaagaatcttcaccttcctatgagctgagattaaaatgagtcatcatcccaactgtgcttacatgtttacatatgatagtcacaatctcaactgtggactgtgtctgcatgtaagattcaggacctcaataatgggctttgtttaagtgagaaaatgatgagaaatacaacctctcctatgtcttgagccctgtgttgacactctctgtaccacccaaggactttctatgaaatgtgagacagtggtatttctctatgactttcatagaaaaatgagacctaggatttgacacgttttcctaagacagacagtattctcatattggctgactcaagttatgagagtaattatgacacctgtaaactgaattaagatatatgtgacaaccccacaactgggtaaggagggagtgagcaggagaatcacaccatctgggtgctgtgtcagagatatttacaaccttctctgagggcagtgaccaggaaagagagtcacaccatgttgttgctgggctagggttatgtcataatttttcatgagagtaggcaacaggcaacagagtcacagcacctgtgtttttagttatgatatgttataatcccatcctgaaagcaggactaaggcatcagagtcccttcaccttgttgccgggcctaacgatatgtcataatgtctctgtggctaggctgagtcagcaaaggcacattacctagtgctggctccagtaatgtgtcacagtgcttttggcatggcccaggcagaagaggaaatttgaaatacctaggtgatgaagaaaaagacacatcttaataaccttgtgggtaggacctatgcaggagagtcatatcacctaggtgttggacccagccatattttacaatgcacaatatacgtgggggccaggcaggagaggagagtttcatcacatgctcactgggctcagtaatatatccccatcttccctgtgcacaaggtgccagcagaagaggagagtcacatttcctaagtgatagatgtagagatatgtcacaggtctcctatgggcaggacccaggcaggaaccttttattttctagatgtttagtgcaaaaatatgtcataaagccttaaatatccaggggccaggcaaaagaggagtgtcatgttacctagaatctgtgtccagtagtatgtcacaacccctcattttttgtaagacccaggcagaagaggagagacacatcacataggtaatagacataaaaaatatattaaaatgcctttgtgagcagggcttatgtgagatagtagttatcacctaggcgtgacaacatgcaatatgtcacaacacacaatgtatgcagggcccaggcaggagaggagagtcacatcaccaaggtgcagggcacatcaacacataaaaattccttattggacagagtccaagatgttgagaaagttgcatcacctaaatgcttggtccaacaatatatcacaataccctctgagtgaaggccccaggcaggagagtgagtcacatcacctagctaagagacccagagatatgtaacgatgctttttctgacaaaggtccaggcaaaagaaacacattatctggtttctggatcaaatgatatgtcacaattctttctgttgtcagggtgcaggcagagatgaggagtcacattttctaggtgatatgtcacaatgcctactgtggggagggtccaagcaagaaactcaaatcaccttggtaatagtccaagcaatttttaatagtgcctttagaaggcaggactaaggctaaaagtgacatcacctttgtgttgagtccagcaatgtgtcacaatgcttcctacaaacatcaccaaggcagaacaggagactcatatcacctgggggcaaggcctacctgtatgtcacaatgcccctgtggattttggtaatgaaaaagaggagagtcacatcacctagctgaactcattgtcttttttccagcttaaactttctaaaagcttagcagtgttctctccaaaacacagagctgctcacattacagcccagctccaaaacgtttgatggctcataacagcctacacagctgagccaacatccattttcctaaggcgaactcctgttatcatatcaacgctacaccaccccgctaaactatattctcttgtcacactctacttcttgtcctaccctgtgctcaaataagcctcatattttaatacttcaagtcctgtacttaaactgcttttttgcccaaatttacatttcttctttcccacgttcttcttctacacatggaaaacctgcacatttgagggtatcaccttttctttccactgcaacttctcacttgccagttctccacgtgttcttgctggttgtgaggcactggtgaattttagaaccagaaccatattacatctatctttgtagttctagagcctggtaccaggtgtaggtgtcaaaaaatggttcccaatgcaagcttgctgaaagtgatattgaagagatgagaaaagaaaggagccagaatgctggtctactaatccagattgctttccaatattgttttgttgaaactctcccaatgtcatgagaaaaataacaatgataataataatactagtagtaaatacagaagataagtcagttaaaattgagctggtagcatgcatgacttcaattctctgtttattcctagttttgaaatagtccttatccacagataggaaaaaactggaaacagaacctcaagtgcctatcacaaggcaagatttgccaatttcataacttgctcaggcaccctcataaaagaatctaggcatgctgatgaccccatctcaaacattcaaaaaagacagaaggtttttctctcactgtcctccagtacatgtagctcctcctgcttaaaaagcaaaacaacaaagaaataatacctcccagaggctatcacagttgatcttggacaaatctttagattaaattagtagtcaagtcaattcaattgttgcccttacttggctcctatcatatgttatgaacttcttaggatcaacccaatgcaaattctgaggcaaaaccttgagtttctatattatgtaagtgacaataacctattataacaaaccaatagacctgttttcacagtgttgggcctacccaaagcaaaactaaatttcccaaacacttatgagtttacagtttcaaatctcttcaaaagtaggtttcatatgagtctttgaacagggctcagcactttcagtgaggttaaaagtgggtgtccacacaaaaggtttcaagagataagaaagtctcccactacccaccacacagaagaccagcagaatcacagagtccatgcccattctttttcacctgtgggaatatttcccaccatgtgaaagaccaccactttttcacatactattctttccaatgagaacatggtaaaaatttgatacttggcaggttttgttcagggtttcactctactttttcactgggtctcagtctgccagcattctgctttagtgtcttgttgaaccccccctctttaagggcacacaaatccaaatcagtcagttcatgcactaacatgacctctgcaagcccctcagtccacagaacaggaatctccattcctgaccatcacaggagggaagttctaacttacattgtcaaatattagctaaaattagctgttgaataggtaagctgtgatttatttctggaaaccagaaccctgtcctggcacatttatactttttccttggtgtgcccatcttttcccttgatatgcctaacaggaagaactctgcacacaggaggttttcagttagtatttttttggtgaacgaatcatgtctctatggtaggtagtctgtcaggggtcagaagcacagccctgaagacaaacttaacagtttgcattgtaatagctggcccactatctgggtccctattttctcatgtaaatcctgaggataataattacttctacacccctctgtcatagaattataatgaatgaaaaaagtgatgcttaaaaaaaattaggatgctggcagctattgctcaataattgttagaccttatgacttctgctcttactgctatcatgctgagtgtgtttctatgtaaaaaactaacaacgaacaaagtgggaaaattaagttacagcttttgattattgacttaccagattggattcctatcgattaataggtctagcacaggtagaagagggacagagtaggtcataggtcacaattcccactgtgagcaggaaccaggcaggagaagtgagtctcaacaatgtcccttctgggcagcaccaaggcaggataataaagccatgtcacctaggtgctgggtccaacaataagtcacaatcctgtatgtgggctgggcccaggctagaaagttcaatcactcaggtgctggccagaggcatatatcacatttacacttgtaggaaggtcatataatgatgtttacaatccagtgcatgtcctgtttctgagtacgtgagttaatgccttatgtaagttgggtcttagtacatgagttcatctcaactataaactggatctgtgcataagaggcacaatccttcctgtgtgctgttttatctgagtcagttacaacctcacagatgtgctgaatattggtcttagagtcattaacctacctgtggatcagattcacatatgagactcaattttccaacgtttgactgcttttggtggtgaaatccagagccttaacaatgggctgtgttgctgtgggaagatgactattggaggaaccagcccccactattttaacgtaggtttttctattttccctaagcgtcagcctgtctgagaaataaagagaaagagtacaaagagataaattttacagcttggcctccaggggtaacatcacatataggtaggttcatgatgttccctgagatgcaaaaccagcaagtttttactagggattttaaaaggggagggggtgcatgaacagggattaggtcacaaagatcacatgcttcaaagggcaacaaagatcacaaggcaaaggcaaaattagaattactgatgagggtctatgtcccgctgtgtacatattgtcttgataaacatcttaacaggaaacagggtttgagagcagagagcctgtctgaccaaaatttaccagctggaatttctcaatcctactaagcctgagggtactgcaggagaccggggcatatttcagtccttatctcaaccgcataagacagacacccccagagtggccacttatagacctccccccaggaatgcaattcttttcctagggccttaatattcaatattccttgctaggagaagaatttactgatatttcttctactctcacgtccatttataggctctttgcaagaagaaaaatatggctctattctgcccaaccctgcaggcacttagaccttatggttatcttctcttgttccctgaaaatcactgttattctgttcttttttaaggtgctctgatttcatattgttcaaacacatatgttttacaatcaatttggacaatagtgatcctgaggtgacataaattcccagcttacaaagataacaggataaagagattaaagtaaagacagacataagaaattatgagagtattattagagaagtgataaatgtccatgaaatcttcacaatttatgttcagagattgcagtaaagacagacataagaaataataaaactatgaattttaggaactgataaaagtctatgaaatattcacaatttatgttcttctgccgtggctccagccagtccctctgtttggggtccctgacttcctgcaacagatgacaattttttctgttgactgagtgagtgtcaaaatctcacttatgtatcaccctagggctttataccttatgcatgagattctcaatctgctctgagacatttgtgctgatgtgaatcatgatcattcctgtgctctttagcccaagtatgaggttcaatgtctctccaattagctgagtccagaatgaagaatcttcaccttcctatgagttgaccttaaaatgagtcaccatcccaactgtgtttacatgtttacatatgatagccacaatctcaaatgtagactacatcaaccagtaagattcaggacctcaataatgggcttcattcaattgagaaaataacaagaaacacaacctcacctgtgccttgggctctgtgttgacactccctgtaacatccaatggctttctattaaatgtgagacagaggtaattctctatgaccttcatacaaaaatgaggcctaggattttttctttatactttaagttttagggtacatgtgcacaatgtgcaggttagttacatatgtatgcatgagccatgttggtgtgctgcacccagtaactcctcatttaacattaggtatatatccaaatgctatccctcccccctacccccaccccacaacaggccccggagtgtgatgttccccttgttgtgtccatgtgttctcattgttcaactcccaactatgagtgaaaaaatgcggtgtttggttttttgtccttgagatagtttgctgagaatgatggtttccagcttcacccatgtctctacaaaggacatgaactcatcattttttatggctgcctagtattccatggtgtatatgggccacattttcttaatctagtctatcattgttggatatttgagttggttccaagtctttgctattgtgactagtgctgcaataaatatgcgtgtgcatgtgtctttatagcagcatgatttataatcctttgggtttatatctagtaatgggatggctgggtcaaatggtatttctagttctagatcactgaggaatcgccaaactgacttccatgatggttcaactagtttacattcccaccaatggtgtaaaagtgttcctatttctccacatcctctccagtacttgttgtttcctgactttttaatgattgctattctaactggtgtgaaatggtatctcattgtggttttgattgcgtttctctgatggccagtgatgatgagcattttatcatgtgtcttttggctgcataaatatcttcttttgagaagtgtctgttcatatccttcatccaatttttgatggggttgtttgttttttcttgtaaactggtttgagttcattgtagattctggatgttagccctttgtcagttgagtagattgcaaaaattttctcccattctgtaggttgcctgttcactctgatggtagtttctttagctgtgcagaagctctttagtttaattagatcccatttgtcaattttggcttttgttgccattgcttttggtgttttagacatgaagtccttgcccatgcctatgtcctgaatggtattgcttaggttttcttctagggcttttatggttttaggtttaacgtttaagtctgtaatccatcttgaattaatttttgtataaggtataaggaagggatccagtttcagctttctacatatggctagccagttttcccagcaccatttattaaatagggaatcctttccccatttcttgtttttgtcaggtttgtcaaagatcagacagtcgtagatatgtggcgttatttctgagggctctgttctgttccatttgtctatatctctgttttggtaccagtaccatgctgtttggttactgtagccttgtagtatagtttgaagtcaggtagcgtgatgcctccagctttgttcttttggcttaggattgacttggcaatgcaggctcttttttggttccatatgaactttaaagtagttttttcgaattctgtgaagaaagtcagtggtagcttgatggggatggcattgaatctataaattaccttgggcagtatggccattttcacgatattgattcttcctacccatgagcacagaatgttcttccatttgtttgtatcctcttttatttcattgagcagtggtttgttgttctccttgaagaggtctttcatgtcccaagtaggttggattcctaggtattttattctttttgaagcaattgtgaatgggagttcactcatgatttggctctctgtttgtctgttattgatgtataagaatgcttgtgattcttgtacattgattttgtatcctgagacttcactgaagttgcctatcagcttaaggaggttttgggctgagacaattggattttctagatttacaatcatgtcatctgcaaacagggacaatttgacttcctcttttcctaattgaataccctttatttccttctcctgcctgattgccctggccagaacttccaacactatgttgaacaggagtggtgagagaaggcatccctgtcttgtgccagttttcaaagggaatgcttccagtttttgcccattcagtatgatattggctttgggtttgccatagatagctctcattattttgagatacgtcccatcaatacctaatttatggagagttttttgttgaattttgtcaaaggccttttctgcatctactgagataatcatatggtttttgtcattggttctgtttatatgctggattatgtttattgatttgcatatgttgaaccagccttgcattccagggatgaagcccaactgatcatgttggataagcttttccatgtgctgctggatttggtttgccagtattttatgaggatttttgcatcgatgttcatcagggatatttgtctaaaattctcttttttatgtatgtctctgccaggctttggtatcaggatgaagctggcctcataaaatgagttagggaggattccctctttttctattgattggaatagtttcaggaggaatgataccagctcctccttgtacctctggtagaattcggctgtgaatccatctggtcctggactttttttggttagtaagctattaattattgcctcattttcagagcctgttactggtcttttaagagattcaacttcttcctggtttagtcttgggagggtgtatgtgtcgaggaatttatccatttcttttagattttttagtttatttgcatagaggtgtttatagtattttctgatgtagttagtatttctgtgggattggtggtgatatcccctttatcattttttattgcgtctatttgattcttccctcttttcttgtttattagtcttgctagtggtctatcaattttgttgatcttttcaaaaaaccagctccaggattcattgattttttgaagggatttttgtgtctttaggtccttcagttctgctctgatcttagttatttcttgccttctgctagcttttgaatgtgtttgctcttgcttctctagttgttttaattgtgatgttagggtgtgaattttagatctttcctgctttctcttgtgggcatttagtgctataaattttcctctgcacactgccttgaaaaaactactttaaagttgatatggaacaataaaagagcccgtgttgccaagtcaatcctaagccaaaagaacaaagctggagggatcacgctacctgacttcaaactatattacatgtctacagtaaccaaaacagcatggtactggtaccaaaacagagatatagaccaatggaacagaacagagccctcagaaataatgccgcatatctacaagtgtctgatttttgaccaacctgacaaaaacaagaaatggggaaaggattccctatttaataaatggtgctgggaaaacaggctagccatatgtagaaagctgaaattggatcgcttcctaacaccttatacaaaaattaattcaagatggattaaagacttaaatgttagacctaaaaccataaaaaccctagaagaaaacctagacaataccattcagtacataggcatgggcaaggacttcaggtctaaaacaccaaaagcaatggcaacaaaagccaaaattgacaaatgggatctaattaaactaaagagcttctgcacagctaaagaaactaccatcagagtgaacaggcaacctacagaatgggggaaaatttttgctatctactcaactgacaaagggctaacatccagaatctacaatgaactcaaaccagtttacaagaaaaaataaacaactccatcaaaaattgggtgaaggacatgaacagacacttctcaaaagaagatatttatgcagccaaaagacacatgataaaatgctcatcatcactggccatcagagaaatgcaaatcaaaccacaatgagataccatctcacatcagttagaatagtgaccattaaaaagccaggaaacaacaggtgctggagaggatgtggagaaataggaacacttttacactgttggtgggactgtaaactagttcaaccatcatggaagtcagtttggcgattcctcagtgatctagaactagaaataccatttgacccagccatcccattactgggtatatacccaaaggattataaatcttgctgctatgaagacacatgcacacgcatgtttattgcagcactagtcacaatagcaaagacttggaaccaacccaaatatccaacaatgatagactagattaagaaaatgtggcccatatacaccatggaatactatgcagccataaaaaatgatgagttcatgtcctttgtagagacatgggtgaagctggaaatcatcattctcagcaaactatcacaaggacaaaaaaccaaacaccacattttttcactcatagttgggagttgaacaatgagaacacatggacacaggaagcagaacgtcacaccctggggactgttttgggtcaggggagggtggagggatagaattaggagatatacctaatgctaaatgatgagtgaatgggtgcagcacaccaaaatggcacatgtatacttatgccacaaacctgcacattgtgcacacgttccctaaaacttaaagtattataataataaaaataaaaaaaagaaaagaaaggtttaactctgtaagatgaattcacacatcactaggaagtttcacaaagagcttctttctagtttttatctggggatattcagtttttcattgtaggcttccattgccccaaatgtttcttcactgcttctaccaaaagagaacttccaaactgctacatgtttaactctgtgagatgaatccattgaaccaaagcactttcacagatagcttctttctagttttcatctgggaatattttgtttcttgccatatgacttaatgggcttccaaatatgtaggtggaccccctgaaactgttgctatggaataaaagaagaaatgctcctgattattgtaaatacaaaattgcatgcaggattgtgtaaagacaatgccatgttgggctgccaaaacgagccaacagcctgtgatgttcttccacctgcagggagcctataaacagatatgcagtcagggagacttcaaaaaatcagtattcctgtcccagagaagcagatgttcataacttttggaatgcacatatcacaaattggtgtctcagaatgcttctttttagtttttttctgaagatatgtcctttttcaccataggccacaatgcattctgaaatatcccttcacagattctataaaaagagtgttgtaaaactgctcagtcaaaagaaaggtttaactctttgagatgaatgcacatatcacaaagcagtttccccaagagcttcttactagttttcattagaagatattttctttttcaccgtaggcctcaaaatgctcccaaatataccttcacagattttagaaaaccacaatttccaagctcctcaatcaaaagaaatgaataactctgtgaaataaaaggaaacatcacaaagctctttcttaggaacctttctagtttttatgtggagatatttcctttttcaccgtagtcctcattgagatctcaaatatccctttgcaaattaaacaaaaatagtattttgaaactgctcaatcaaaagaaaggtgtaactctgtgagaagaatgtactcatcacaaagcagttcctcagaaagcatctttctggtttttatctgaggatatttcctttttcaccatcagcctcattacattccctagtatcctttcacagattctaccaaaacagtttccaaactgctaaatcaaaagaaagcgttatttctgtgagatgaatgcacacatcacaaagtagtttctcagaaaatgtctttctagtttttatgtgaatatattttctttttcactgtaggtctcaatgcgctcccaaatatcccatcccagattctgaaaaaacagtgtttccaaacagctcaatcaaaagaaagctttaactctgtgagatgaatgcacaaaccacaaagctgtttctcagatatctttctaggtctatctgaagacatttaattattcaccataggcctgaatatattcttaaatatctctccacagattctacaaaaacactgtttccaaacttctgaatcaaaagaaagttttaactgtgtgagatgaatgtgcacatcacaaagcaccttctcagaaacttctttttagttttttgtgaagatatttcctttttcaccataggcctcgatgtgctcccaaatatccctttgcagattcaacaaaaacagtgtttccaagatgctcaatcaaaaaaataatttatctttgtgggatgaatgcacacatcacaaagcagtttctccaaaagcttctttctggttttcattcgaagatatttcatttttcaccataggcctcaatgcactccaaaacatccctttagggattatataaaatcggtgtttccaaactggtcaatcaaaagaaactttaactctgtgagatgaatgcacacaactcaaagaagcttctgagaaagcttctttctcgtttttatttgaagatatttcatttttcaccacaggcctcaatgtgttcccatataacccttgacagattctataaaaacagtgtttccaaacttctcaatcaaaagaaaggtttaactctgtgagatgaatgcatgcatcatgaagcagtttctcagaaagcttctttctagtttttatgttaatatacctcctttttcaccataggcctccatgtgctcccaaatatccctttgcagatacaacaaaaattgtgtttccaaactgctcaatcaaaagaaagctttaagtctgtgagatgaatgcacttatcacaaagctgttaatcagaaagcttctttctagtttttttgtgaagatatcctttttcaccataggcctcaattcgctctgaagaatcccttagcagatttgcaaaaacagtttttccgaactgctcaactgaaagaaagactcaactctgtgagatgaatacacacatggcaaatcagtttctcagaaagcttctttctactttttatctgaagatatttctttttcaccatagtccccatagcactcttaaatatctttttgcagattccacaaaaaatgtttttctctaaaatgttcaaccaaaagaaagcttaaactctatgagacaaatgcagacatcacaaaacagtttctcataaagcttctttctagtttttatctgaaggcatttcctctttcaccataggcctcaaaactgtcctaaatattccttcccattttctacaaaaacagtgtttccaaactgctcaagcaaaagaaagctttagctctgtgagaggaatgcacacatcacaaagaagtttctcagaaagcttctttctagtttttaccagaggatatttcctttttcaccataggcctcaatttgctcccagatatctattcacagattctacaaaaacggtatttcccagctgctcaatctaaagaaaggattaactccgtgatatgaatgcacgtataagaagcagtttctcagaaagcttctttctagtttttatctgaagattgttcttttacaacataggcctcattgagctccaaactgtaccctgacagactctacagaaacagtgtttccaaactgctaaatcaaaagaaagttttaactctgtgagaaaaatgaatacatcaaaaagcagattctcagaaagctgccttcaagtttttatctgaggatatttcctttttaaccataggcttcaattcactcccaaatatcccttagcagattctgcaaaaaaagtgtttccaaactcctcaatcaaaagaaagatttacctctatgagaggaatgcacacatcacaaagcagtgtctccaaatgcttctttctggtttttatctgaagatatttcctttttcgccatagcccaaagtgcttctaaatatcctttcgcaggttgtacaaaaacagtgtttccaaactgctccatcaaaagaaagcttaaactctgagacgaatgcagacatcacaaaccaggttctcagaaagcttctttctagtttttatgtgaagttatttcctttttcactctaggcatcaatgctctcccatatatcccttgacagagtctacaaaaaaagtgtttccaagctgctcaatcaaaagaaatttttaactctgtgagaggaatgaacacatcataaagcagtttctcagaaagttgctttcaagtttttatcagaggatatttcctttttcaccacagcaccaatatgctcccaaatatcccttcacagattctacaaaaacagttttccaagctgctctattgaaagaaaggtttaactctgtgagatgaatgcgcacatcacaaagcagtttctgggaaagcttcataataggtttcatctgaagatatttactttttcaccatgggcctcaactcccaaatatcacttcacagattgtacaaaaacagtgtttccaaactgctcaatcaaaagaaaggtttaactctgtgagatgaatgcccacatcacaaagcagtttctcagaatgcttctttttagttttcatctgaagatatttcctttttcacataggcctcaatgtgttcctaaatatcccttcacagattccacaaaatcagtgtttccaaactgatcaatcaaaagaaatggttaactctgtgtgatgaatgcacacatcacaaatcagtgtctcaaaaagcctttctgtggtttttatctgaagatatatccttttccaccataagcctcaaagtgttcccaaatatcctttagcagattctaacaaaacagtgtttccaaatgctaattcaaaagagaaatgcaaatcaaaatcacaatgagataccatctcacaccagttagaatggcaatcattaaaaagtcaggaaacaacaggtgctggagaggatgtggagaaataggaacacttttacactgttggtgggactgtaaactagttcaaccattgtagaagtcagtgtggcgattcctcagggatctagaaagagaaatacgatttgacccagccaccccattactggatatatacccaaagcattataaatcatgctgctataaagacacatgcacacgtatgtttattgcggcactattcacaatagcaaagacttggaaccaacccaaatgtccaactatggtagactggattaagaaaatgtggcatatgtacgccatggaatactatgcagccgtcaaaaatgatgagttcatgtcctttgtagggacatggatgaagctgaaagccatcattctcagcaaactatcgcaaggacaaaaaaccaaacaccgcatgttctcactcataggtgggaattcaacaatgagaacacatagacaaaggaatgggaacatcacatactggggcctgttgtggggtgggggaggggggagggatagcattaggagatatacctaatgctatatgatgagttaatgggtgcagcacagcaacatggcacatgtatacatatgtaacaaacctgcatgttgtgcacatgtaccctaaaacttaaaatataataacaaaatttaaaaaaaagagaatgttttaaatctgtgagatgaatgcacacataacaaagaagtttctcagaaagcttctttctatttttcatctagagatatttcctttttcaccataggcctcaaagtgctcccaaatatccctttacagattctacaaactcagtgtttccgaactgcttaatcaaacgaatgcttaaactctgtgggatgaatgcagacatcacaaagcagtttctcagacagcttcattatatttcttatttgaagatatttcctatttcaccatatgcttcaaagtactcccatatgtccctttacagattctacaaaaacagtgtttccaagatgctcaattaatagaaaggtttaatttggtgagatgaatggacacatcacaaagctgttaatccaaaacttctttctcgtttttatctgaagatattttttttttcaacataggcctcaatatgctcccatatattccgtgacagattatataaaaacagtgtttccaaactgctcaatcaaaagaatatttaactctgtgagatgaatgcacacatcacaaagccgtttctcagaaaacttctttctagtttttaaatgaagatactccctttttcaccataagcctcaatgggctcccaaataatcctttgcggattcaacaaaaacagtgtttccaagatgctcaataaaagaaagatttatctctgtgagatgaatgcgcatatcacacagcagttaatcagaaggcttctttctagtttttatgtgaagattatttcctttttcaccagaggcctcattgcattcccaaatatcccttcacagattccacaaaaatagtgtttccaaactgttcaataaaaagaaaggtgtcactctgtgagatgaatgcctacatcacaaagcagttcctcagaaagcatatttctggtttttatatgaggatatttcctttctcaccataggccacaatgagctcccaaatatcctttcacagattcttcaaaaacagtgtttcaaacggcttaatcaaaagaatgcttacacactgtgagacaaatgcagacataaaaaagcagtttctcagaaagtgtctttctagtttttatttgaagatatttcctttttaaccataggcctcaatgcactcccaaatatcccttggcatattctacaaaaacagattttccaaactgctcaatcaaaggaaagttttaactctgtgagatgaatgcactcattacaaagcagataatcagaaagcttccttctagttttaatgcgaagatatttcctttttcactataggcctcattgtgtttcaaaaaatcctgtcacagattctacaaatacagcgttaccaaactgctcaatcaaaagaaaggtgtcactctatgagatgaatgcacacatcacaaagcagttcctcaaaaagcatctttctggtttttatctgaggatatttcctttttcaccatcagcctcattacattccctagtatcctttcacagattctacaaaaacagtgtttcaaaactgcttaatcaaaagaatccttacactctgtgagacaaatacaggcataacaaagtagtttctcagaaagcgtctttctagtttttatgtgaagatattccatttttcaccataggcctcaatgcactcccaaatatccctttgaatattctacaaaaagagattttccaaactgctcaatcaaagtaaagttttaactctttgagatgaatgcgcacatcacaaggcagataatcagaaagcttctttctagtttttatgcgaatatatttcctttttgactgtagacctcattgcattccgaaaaatccctacacagattctacaaaaacagtgtttccaaactgctcaatcaaaagaagggtgctgctctgtgagatgaatgtacacgtcacaaagcagtgccttagaaggcatctttctggtttttatctgaggatatttcttttagcatcataggccccagtatgctcccaattatcctttcacagtttctacaaaaacagtgtttccaaactgcttcatcaaaagaatgtttacactctgtgagacgaatgcagacatcacaaagcagtttctcagaaagcttctttctagtttttatgtgaagatatttcctttctcaccatagacatcaaagtgctcccacatatcccttcacagattgtacaaaaaaagtgtttccaagatgctcaatcaacagaaaggattaattccgtgagatgaatggactcatcatctcacatctcacatctcacatctcacatctgattaacaaagctgttaatcagaaagcttctttctggtttttatctgagaatatttcctttttaaccataggtctcaaagggcttaaaaatatcccttcttagattttacaaacacactgtttccaaacttctcaatcaaaagaatagtttcactctgtgagatgaatgcacacatctcaaagctgtttctccaaaagattctttctggtttttatctgaagttatttccttattcaccataggcctcaatgtgctcccaaacatcctttcccagatcctacaaaaacagtgtttccaaactgctcaatcaaaggaaaggtttagctctgtgagatgaaagcacacatcgcaaactcattctgagatatctttctggtttttatctgaggatatttcctttttcactataggcctcagtaggttcccaaatatctcttcccagattctacaaaaacagtgtttccaaactgctcaatcaaaagaaatgtttaactctgtgagatgaatgcattaatctcaaagcagtttctcacaaagcttctttctagatttatctgaatatatttcctttttctctgtaggcgtcaaagcactcccaaatatcactttgctgaatctacaaaaacagtctttccaaactgcttcatgaaaaaaaaggattaactccgtgagatgcatgcacacatcacaaagcagtgtcacaaaaagcttatttctagtttttatgtgaagatatttccttttccaccattggcctcaaggcactcccaaatatcccttcgcagattgtacaaaaacagtctttccaagctgctatataaaaagaaaggtttaattctgtgagatgaatgtacacatcacaaagctgtttctcagagcacatctttctaatatttatgtgaagatatgtcctttttcaccattggcctcaatgtgctcccttatatcccttgacagattctataaaaacagtgtttccaaactgcctaatcaaaagaaaggtttaactctgtgagatgaataaatacatcacagagcactttctcacaaaacttctttccagtatttatgtaaagatatttcctttttcaccgtaggcctcaatgcactccaaaatatcccttcacagattctagaaatacacagtttccaaactgcttaatcaaaacaaaagattaactctgtgagatgaaagcacacatcacaaaactgtttctcagaaatctttctggtttttatctgatgatatttcctttttcaccatagacctcaatgctttcctgattgtccctttgcagatccaacaaaaacagtgtttccaaactgctcaatcagaagaaagttttaactcagagagacgaatgcacacatcacaaagcagtttctgggaaagcttctttctagtttttatgtgaagatattttctttttcaccatagggctcaaagagctcccatatatccattgacagattatattaaaacagtgtttccaaactgctcaatcaaaagaaatatttaactctctgagatgaatgcacacaacacaaatcagtttctctgaaatattctttctagtttttatgtgaagatgtttccacttccaccataggcctgaatgtgctccaaaatatccttcacagattctagaaacacaatgtttccaagatgcaccatcaaaggaaaggtttaactctgtgagatgaatggactcatcaaaagcagttagtcagaaagcttctttcaattttttatctgaggatattttctttttcaccataggcctcattgcattccgaagtatcctttcacagattccacaaaaacagtgtttccaagcttcccaataaaaaggaagctttatctctgtgagacaaatgcacacatcacaaagcagtttctcagaaagtgtctttctggtttttatgtgaagatatttccttttttcactctcagcctcaaagcgctcccaaatatcccttcacagattctacagaaacagtttatccaaactactcgatcaaaagaaaagtttaactctgtgatttgaatgcacaaattacaaagcagtgtctcagaaagcttctttctagattttatctgaggataattcctttttcaccataggcctcaatgtgctctcataaattccttggcagattctacaaaagcagtgtttccaaagagcaccatcaacagaaaatgtaactctgagatattaatttacacatcacaaagaattttctcagaaagcttctttctacttttcattggaagatattgtctttttcaccttggtcctcattgtgtttccaaatatccatttgcagattctagaaaaacacagtttccaaactgctcaatcaaaagaaaggattaactgtgtgagatgaaggcacacagaaacaaagctgtttctcagaaatctttctagtttttatgtgaagatatttcctttttcaccataggcctcattgcattcccaaatatcccttcacagattctacaaaaatagtgtttccaaactgctcaatcacaagaaatgtgtatctctgtgagatgaatgcacacatcacaaccagtttatcagaaagattctttctagtttttatctgagaatatttcctttttcaccattggcctcaaagggctcccaaatatcccttatcaaattctacaaaaacagtgtttccaaactgctcaatcaaaagaatattttaactctgtgagatgaatccacacatcacaaaccagtttctccaaaagaatctttctgttttttatctgaatgtatttccttttcaaccataggcctcaatgtgctcaaaaatgtcctttcccagatcctacaaaaacagtgtttcaaaactgctcaatcaaaggaatggtttaactttgtgagatgaatgcacacatcacaaagctgtttctcagaaatctttctggttatatctaagaacatttcctttttcactataggcctcaatccattcccaaatatcccttcgcagattctacacagtgtttccatactgctcaatcagcacataggttttactatgtgagatcaatgcatccgtcacaaagcagtttctcagaaagcttctttctagatttatctgaagatgtttcctttttctaagtaggcctcaaagcactcccaaatatccttcacagattctacaaaaacagtctttccaaactgctcaatcaaaaggaaggattaactctgcaagatgaatgcacacatcagaaagcagtttctcagaaagcttctttctaatttttatgtgaaaatacctcctttttcaacataggccttgaggaactcccaaatatccctttgcagattgcacaaaaaacagtgtttccaaaatgctaaataaaaagaaaggtttaactctgtgagatgaaagtacacgtcacaaatctgtttctcagaacacttctttgtagtatttatctgaagatatttcctttttcaccataggcctcaatgtgctcccaaatatccctttgcatattctagaaaaacagagtttccaaactacttaatcaaaggaaaagattaactctgtgacgtgaaagcacacaccatgaagctgtttcttagaaatctttctagtttttattgacgatatttcctttttcaccataggcctcaatgtgttcccaaatatccctttgcaggttctacaaaaacagtgcttccaaactgctcaatcagaagaaaggtttaactctgagagatgaatgcacacatcacaaagcagtttctcagaaagcttctttctagtttttatgtgaagatatttcctttttcaatgtagggctcaatgcttcccatatatccatggacagattatattaaaagagtgtttccaaacttctcaatcaaagaaatctttaactctgtgaaatgaatgtacacatcacaaagcagtttctcagaaatcttctttctactttttatgtgaagatgcttcttttttcaccataggtctcaatgtgctcccagaaatccttggcagatagtacaaaagcagtgtttccaagatgctcaatcaatggaaagattaaactccatgagatgaatggacacatcacaaagcagtcgatcagaaagctacttctaatttttatctgaggatatttcctttttcaccttaggcctcattgcattctgaagtatcctttcacagattctacaaaaacagtgttccaaggtgcccagtaaaaaggaagctttatgtctgtgagacaaatgcatacatcacaaagcagtttctcagaaagtatctttctggtttttatgtgaagatatttcctttttcaccataggtctaaatatgcttccaaatatcccttcatagattctaccaaaacagtattttcaaactgctcaatcaaaagaaaggtttagctctgtgagatggatgcacacatcagaaagcagtgtttcagaaagcttctttctagattttatgtgaagatatttctttttcagcataggcctcaatgtggtatcataaatcccttcacagactttataaaaacagtgtttccgaagcactcaataaaaagaaaatttaactctgtgagatgaatgcacacatcacaaagcagtttctcagaaaggttctttctagttttcatcagaagatattttctttttcaccataagcctcattgtgctcccaaatatcccttttcagattctagaaaaatacagtttccaaactcctcaatcagaagaaaagattaaccctgtgagatgaatgcacacatcacaaagcagtttctcagcaatctttctagtttttatgtgaagatatttcctttttcaccataggcctcattccattccaaatatcccttcacagattctacaaaaatggtgtttacaaactgctcaatcagaagaaaaagttcaattctgttagatgaatgtacccatcactaagcagtttctcatgaagcttctttctatatttatctgaagatattcctttttcacagtaggcctctatgctcccaaatatcccttcatggatcctgcataaacagtctttccaaactgctcagtgaaaagaaagtatttactcagtgggatgaatgcacacatcacacatcagtatctcaaaaagcttttttctggtttttatctgaagatatttctttttccaccataggcgtcaaggcactcccaaatatccctgtggagattctaacaaaacagtgttttcaaactgctcaatcaaaggaaaagtttatctctgtgagacgaatgcacacctcacaaggctgtttctcagaaagcgtctttctagtgtttatctgagcatatttcctttttcaccataggcctcaatgtgctcccaaatatcccttcacagattctaccaaatcagtgtttccaaactggtcaaacaaaagaaaactttaaatgtgtgagatgaatgcacacatcacaaaacagtttctcagaaagcatctttctggtttttacctgaggatatttccttttttgccataggcctcaatgtgatcccaaatatcctctcacagattcgacaaaaagtgtgcttgcaaactgctcaatcaaaggaatgcttaacctttgttaaacaaattcagacattacaagcaggttttgagaaatattctttgtagtttttatgtgaagatatttcccttttcaccataggcttcaatgtgttcccttatatcccttgaaacattctacaaaagcagtgtttccaaactgctcaatcaaaagacaggtttaaccctgtgagatgaatgcacacatcacaaagcagtttctcagaaaacacctttctggtttttatctgaggatatttctttttcaccttaggcaccagtgcactcccaaatatcctttcacagattttacaaaaactgtttccaaactgctaaatcaaaaggatacttaaactatgtgagacaaatgcagacaacccatagcagtttctcagaaagcttctttctagtttttatgtgaagatatttcctttttcacccaagtcctcaatgtgctccaaaatacccttcacaggttctaccaaaatagtgtttctaagatgctcaatcaaaaaaaggtttaactctgtgagatgaatgtacacctcacagagcagttaatcagaaagcttctttctaagttttgtctgaggatatttcctttttcaccacaggcctgattgcgttcctaagtatacttttgcagattctagcaaaacagcgtttccaaactgttcaataaaaaggaagttttatctctgtgagatgaatgcacacatcacaaagcagtgtctcagaaagctcctttctagtttttatctgaagatatttcctatttcaccagattcctcaatgtgctcccaaatgtcccttcacagattctacaaaaacagtgtttccacactgctcattgaaaagaaaggtttaactctgtgagatcaatgcacacttcacaaacagattcttggaaagcttctttcaagttttcatttgaagatatttcctttttcaccataggcctcaatgtgtacccaaatatcccttcacagattctacaaaaagagtgtttccaaactgctcaaaggaaatgttttaccctgtgagatgaatgcacagatcacaaagcagtttctcagaaagcttctttctagtttttatctaaaaatatttccttctccaccattggcctcaatgcgctccctaatatcccttcacggattctagaaaaacagagtttccaaactgcttaatcaaaagaaaggattaactctgcgagatgaaagcacacatcacaaaactgtttctcagaaatctttctattttttatctgaggatatttcctttttcaccataggcttcaatgcgctcccttagatcccttgatagatactacaaaaacagtgtttccaaactgctcaatcagaagaaagatttaactctgtgaggtgaatgcacacatcacagagcagtttctcagaaagcatctttctggtgttgatctgacgatatttcctttttcaccacaggcttcaatgcactcccatatatccattgacagattctgtaaaaacagtgtttccaaacttctcaatcaaaagaaatgtttaactctgtgagatgaatgcattcatcacaaagcagtttctcagaaagcatctttctggtttttatctgaggttatttctttttcaccttaggccccaatgtgctcccaaatatgcttttgcagattctacaaaaaccgtttttccaatctgcttaatcaaaagaattcataaacactgtgagacaaatgctgacatcacgaagtggtttctcagaaagcttcattctagtttttatgtgaagatatttcctttttcgccaaaggcctcagtgtgctccaacatatcccttcacagattgtacaaaaacagtgtttccaagatgctcaattcaaagaaagttttacctctgtgagatgaatgtacacatcacaaagcagttaatcagaaatcttctttctagtttttgtctgaggatatttcctatatcaccataggcctcattgcattccccagtatactttcacagatcctacaaaaacagtgtttccaaactgctcaatcaaaagaaagcaatatctctgttagtcaaatgtacacatcacaaagcagtttctcagaaagtgtctttctagtttttatgggaagatatttactttttcaccataggcctcaatgcactccaaaatatcacttcgcagattctacaaaaacagtgtttccaaactgctcaagcaaaagaaaattttaactctgtgagatgaatgcactcatcacaaaggagattctcagaaagattctggctagttttttctgaagatatttcctttttccctaaaggcctcatagcgctcccaaatatcccttctcagattctacaaaaacagttttgccaaactgctcaatcaaaggaaatgtttaattctcttttaagaatgaattcttcacaaagcagtttctcaggaagtttctttctacttttcatctgaagatatttcctatttcaccataggcctcaaaatactccctaatatccctttgcagattctacaaaaacagtgcttccaaactgttcaatgaaaagaaaagtttaattctttgagatgaatccacacatcacaaagcactttctcagaaagctactttgtagtttttatctgaggatatttctttttcactgtaggcctcaatatgctcctaaatatcctttagcagattgtacaaaaacactatttccaaactgctctatcaaaagaaagttttaactctgtgagaagaatgaacatatcaaaaagcagattctcagaaaggtgctttcaagtttttacctgaggatattcccttttccaccatagccttcaatttaatcccaaatatcacttagcagattctccaaaaacagtgtttccaaactgctcaatcaaaagagagcttgaactctgtgagaccaatgcaaacatcacaaagcaatttctcagaaagactccttctagtttttatgagaagatatttcccttttccgcctaggcctcaatgctctccatatatcccttggaacagtccacaaaaacactgttgccaaacttctcaataaaaggtaagtaaaaactctgtgagatgaatgcacacatcagaaagtaatttgtcagaatgcatatttctagtttttatcaagggatatttcctttttcatgatatgattgtaagtgctccaaaatatcccttcacagattctataaaaacagtgtttccaaattgctcaatcaaaagaaaggcttaagcctgtgaaatgaatggactcatcacaaagcagtttctcagaaagcttctttccagtttttatctgaatatatttctttgttcaacatagacctcaactgctccaaaatgtcccgtcgcagattctacataaacagtgtttcaaaactgctcaatcaaaagaaaggtttaacactgggagatgaatgcaatcattacaaatcattttcccaggaaggttctttctagtttttatctgaagatatttcctttttcaccataggcctcaatgtgctcccttatatccctttgtagattctgcaaaaacagtgtttccagaaggctcaatcaaaaaaagatttaactctttgggaagaatgcacacataacaaagccatttttgagaaagctcctttctagtttttatctgaagatatttcctttttcaccatgggcctcagcacgctcacaaatatcccttcacagattctatgaaaacattgttgccaaactgttcaatcgaaagaaatgttgaactccttgatatgaatgtactcaagactaagcactttctcagaaagcttctttctagtttttatctgaagatatttaccttttcaccataggcctcaacatgctcccacatatcccttagcagattctgcaaaacagtgttttcaaactgcttattcaaaagaaagttttaactctatatgataaatccactcttcacaaagcagtttctcagaatgcttctttctagttttaatctgaagataattcctttttcaccataggcctcaatgtgttcccgaatatctcttagtagattttgcagaaacagtgtttcccaactgctcaatcaaaattatgttttaacactgtgagatgaatgtacacataagaaagcaggttccagaaagcttctttctagtttttacctgaagatatttcctttttcaccataggcatcaaggtactcccaaatatgccttctcagattctccaaatcactgttcccaaactgctcagtcaaaagaaaggtttaactctttgagatgaattcactcatcacaaagaagtttctccaaaagcttctttctaggttttctctgaagatatttctattttcaccattggcctcaatgcggtataaaaatcccttcctagattctacaaaaacagcatttctaaactgctcaatcaaaagaaagatttaattctgtgagaggaatgcacaaatcacaaaccagtttctgaaaaagctttttgccagtttttgtctgaagatatttccttttgcaccataggcctcaatgtgctcctaaatatcccttcacagattctaccgaagctgtgtttccaaagtactcaattgaaagaacagtttaactctctgagatgaatgcacacatcaaaaatcagttttccagaatgcttctttctagtttttttctgaagatatttcttttttttaccatagacctcaatgcattcccaaatatcccttggtagattttacagaagcagtgtttccaaactgctcaatcaaaataatggtttaactatgtgagatgaatgcacaaatcaaaaagcagtttctgagaaagtttcttcctagtattaatctgaaaatatttccttgctcaccattggcctttaagtgcttccaaatatcccttctcatattccacaaaagctgtgttgtcaaactggtcaatcaaaagaaaggtttaactctgtgagatgaatgcactcatcacaaagcagtttctcagaaagcttctttctaatttttaactgacaatatttcctttttcaccctaggcctccatgcgctcccaaatatcccttggcagattttaccaaaacagtattaccaaaaggctcaatcaaaagaaagttttaattctgtgagatgaatgcactcatcaaaaagcagcttctcagaaagcttcgttctaagtttttatctgaagatatttcctttttcaccataagccccaatgtgctaccaaatatcccttcgcagattccacataaacagtgtttccaaacagttcaatcaaaagaaaggtttaactctatgagatgaatgcactcatccaaagcagtttcacagaaagcttctttctaatttttatctgaagatatttccttttaaacaataggcctcaatgcactcccaaatatcccttcacagattctactaaaacagtatttccaaatggctcaatctaaaggtttaactctcttagatggatgcacacttcacaaagcagtttctcagaaagcttctttctggtttttgtctgaagatatttcctttttcaccattggcctcagtgggctatgatacatcactttgtagactctataaaaagtgtttcaagactgctcaatcaatagaaagttttatctctgtgagaagaatgcacatatcacaaaggggtttctgagaaagtttctttctagtttgtatctgaagatatatcctttttcaccgtagacctcaatgcattcccaaatgtctctttgcagattatacaacagcagtgtttacaaactgctcaatcaaaagaaaggtttaactctgtgagatgaatacacacatcacaaagcagtttctcaaaaagcttctttctagtttttatatgaagatatttcctttttctccataggcttcaaagtgctcccaaatatccctaggcagattccacaaaaacggtgttgccaaactgcccaatcaagagaaagttttaactctgtgagatgaatgcactcatcacaaagtagtattgcagaaaacttctttctagtttttatccaaagatatttcctttttgaccataggcctcaatgtgctcccaaatatacctttgcaaattctacaaaacagcgtttccaaaccactcagtgaaaagaaagttttaactcagtatgatgaatgcacatttctcgaagcagtttctcagaatgcttctttctagtttttatctgaagatatttcctttttaaccacaggcctcaatgcactcacgaatatccccttgcagattacacaaaaacagttcttccaagccattgaatcaaaaaaaaacaaaaagatttaactctgtgagatgtatgcacacatcccaaagcagtttcccagaaagcttctctctagtttttatctgaagttatttcctttttcaccataggccttaaagcactacgaaatatcctttctcagattccatgaaaacagtgttgtcaaacttctcaatcaaaataaaggcttcactctgtgagatgagtgcactcatactaatcagtttcccaaaaaggtctttctagtctttatctgaatatgtttcctttttaaccataggcctcaatgcactcccaaatatcccttcacagatactacgaaaacagtgtctccaaacagagcaatcaaaagaaaggtttaactatgtgagatgagtgcacacatcacaaagcattttttttcagaaagcttctttctagtttttctctgaatatattttgtttcaccatagtcctcaatgagctcccatatatctctcgtagatttgaaaaaaacaggtttccaaacagctcacactaaagaaaagtttaaccctatgagaagaatgcacacatcacaacgcggtttctgagaaagcttctttctagtttttatctgcaggtatttcctttttcaccacaggcctcaaagcgctcccaaatattcctttgcagattatacatgaacagtgtttaaaaactgctcaatcaaaagacagttttaactttgtgagatgaatgcacacatcacaaagcagtttcccagaaaggttctttccattttttatctgaagatatttgctttttcaccataggcctaaaagcatcccaaatatcccttctcagactctacaaaacagtgttgccaaactgctcaatcaaaagaaagttttaactctatgagttgaatgcacacactaccaagcagtttaccagaaagattctttatattttttatctgaagatatttcctttttcaccatagaccttaaagcacccccaaatgtcctttcacagatggcacaaaaacagggttgccaaactgcttaatcaaaagaaagttttaactctgtgagatgaatgcattcaacacaaagcagtttctcagaaagcttctttctagtttttatctgaagatatttcctttttcaccataggcctgaatgcactcccatatatccctttgtagagtctacaaaaatgtgtttccagatggcttaatcaaaagaaaggtttaactctgtgagtagaatgcacacatcacaaattgttttctgagaaaccttctttccagtatttatctgaaaatatttcctttattaccttaggcctcaatgcactctcaaatatcccttcacagattctacgaaaacagtgtacccaaactgctcaattaaaagaaaggttcactctgtgacatgaatgcacacagcacaaagcagtttctcagaaagcttctttctagtttttatctgaagttatttcatttctcattataggcctgaaattgctcctaaatatcccttctcagatccttcaaaaacactgttgccaaactgctgcgtcaaaagaaaggtttaactttgtgagattaatgcactcatcacaaagcagtttctaagaaagcttctttctagtttttatctgaagatatttcctttttcaacataggcctcaatgtgctctgaaatatccctttgctgattctaccaaaagagtgattccaaacagctcaatgaaaagaaagctttaactctgtgagacgaatgctcacatcacaaaccagtttctcagaaatcctgtttctgtttgtctctgaagatatttcctttttcaccacaggcctcaatgcactcccatatatcccttcctagattctacaaaaacagtgtttccagactgctcaatcaaaataaatgcttaactctgtgagaagaatgcagacaacacaatgcagtttctgaaaaagtttctttctagtttttctgaagatattttctttttcactataggcctcaatgcgctcctatatatcctttcatagattctacaaaaacagtgtttccagacttctcaattgaaagaagggtttaactctgtgagaagaatgcacacatcacaaaagagtttgtaagaaagcttctttcttgtttttctctgaggatatttcctttttcaccacacgccacaatgcacaacaatatgtcccttcagagatctacaaaaacagtgtttccaaactgctcaattaaaagaaagatttaactctgtgagaaaaatgcacacatcacaaagggtttctgagaaagttactttgtaatttttatctgaagatatttcatttttcatctaaggcctcaatactctcccaaatatcccttcacagattctacaaaaatagtgtttccaaaatgctccatcaaaagaaaggtataagtctgtgagaagaatgcacacatcacaaagtggtttctaagaaagatgctttctaagattcatctgaagatatttcccttttcaccattggcctcaatgcgctccaaaatatcctttcacagattctacaaaaacagtgtttccaaattgctaaatcaaaagaaaggtttgactctctgagatgaatgaactcatcacaaagcagttactcagaaagcttctttctagtttttttctgaagatatttcctttttcaacataggcctcaaaatgctcacatatatccctccacagattctacaaaaagagtgttgccaaactgctcaatcaaaaggaaggtttaactctgtgagatgaatgcacacatcagaaagtagagtctcagaaaatttgtttctactttttctctgaagatatttcatttttcaccataagactaaaatatctcccatatattccttcgtagattgtacaaaaacagtgtttccagactgctcaaccaaaggaaaggtttaactctgtgagaagaatgcacacatcacaaagcagtttctgagaaagcttctttctagtttttatctacagatatttcctttatcacggtaggcctcaatgcactcccaaatctctttgcagattctatggaaacagtgtttccaaactgctcaaaagaaaggtttaaacctgtgagatgagtgcacacataatagaacagtttccagaaaccttctttccagtttttatctaaagatatttcatttttcaccataggcctcaaagcactcccaaatatccctttgcagattgtacataaacagtgtttccaaacagctcaagcaaaagaaaggattaactctgtgagatgaatgtacatatcaaaagcagtttctcagaaaacttctttctagtttttgtctgaaggtatttcctttttcaccataggccttgaagcactcccaaatataactttgcagattctacaaaaacagagttgccaaactgtgccttcaaaaattggtttacctctgtgagatgaatgcattcatcaccaggcagtttctcagaatgattctctatagttttgatctgaagatattttcttttctacaataggactcaatgtgctcccaaatatcccttcgcagtttccacaaaaacagtgtttccaaactgctcaataaatataaagttttaactctatattatgaatttgcacatcacaaagcagtttctcagaaagcttctttctagtttttatctgaagatatttcctttttcaccataggcctcaatgcactcccagtatcccttggtagattttacagaatcagtgtttccaaactcttcaatcaaaatatggtttaacattgtaagatcaatgtacacatcacaaaacaggtttctgaaggcttctttctagtttttatctgaagatatttcttttttcaccataggctctgaagcgctcccaattattccttcacagattctacaaaaacagtacttccaaactgctctatcaaaagcaagttttaactctgtgagaaggatgcactcatcacaaagcagtttctctgaaagattctttctagtttttatgtgaagacatttccattttcaccctaggcctcaatgcactcccaaatatcccttcatagtttctagcaaaacaggttttccaacctgctcaataaaataaaggttcaactctctgtgatgaatgcacacatcaccaagcagtttttgagaaagcttctttctagtattttcctgaagatatttcgtttttcaccgtaggcctcaatgctgtcccaaatatcccttcacagattctacaaaaacagtgtttccaacctgctcaatcaaaagaaaggtttcactctctgagaagaatgcacacatcacaaagcagtttctgagaacagttttttctattatttatatgaagatatttcgtttttcaccataggcctcaatggctccaaaatatcccctcacagattctacaaaactggggttccaaattgctcaatcaaaaaaattttaactctatatgatgagtatgcacatcacaaagctcagaatgcttctttcttgtatttatctgaagatgtttcctttatcaccttaagcctcaatgcactcccaagtatcctatgacagattttacagaaacagtgtttccaactttcccaatcaagataatggtttaactctgtgagacgaatgtacacatcacaaagcaatttccagaaagcttctttctagtttctatctgaaaatattacttttttcaccataggcctcgagtcctcccaaatatccctttgcagatttataaaaacattgtttccaaactgctcaatcaaaagagacgtttaattctgtgagatgaatgcacttatcaacaagcagtttctcagaatgattctttatagtttttatctgacggtatttcctttttcaccaaaggcctcaatgtgctcccaaatatccctttgcagattctacaaagcagtgtttccaaactcctcaaccaatagaaagttttaactctttatgatgaatgtgcgcatcacaaagcggtttctctgaaagcttctttctagtttttatctgaaggtatttcaattttcagcataggcctgaaagtgctcccaaatatccctttgtagattctacagaaacagtgtttccaaactgctcaatcaaaagacagtttttagtctgggagaagaattcagtcatcaccaagcagtttctcacaaagcttctttctagtttttatctgaaggtatttcctttttcaccataggtcccaaagcattcccaaatatccctttgaagattctacgaaaacagtgtttccaaacttctcaatcaaaagaaaggtttaactctgtgagatgaacgcacacatcacaacgcagtttctcagaaacattctttctagtttttctctaaagatatttcctttttcactttaggccttaatacgctcccagatatcccttcatagattatacataaacagtgtttccagactgctcaatcaaaagaaagctttaacactgtgaaagtaagacacacatcacaaagctgtttctgagaaagcttctttctactttttgtctgaaaatatttcctttttcaccatagacctcagtgtgctcaaaaatgtcctttcatggatgctacaaaaatagtgtttccaaatagctcaatcaaaataaaagtttaaccctgtgagatgaatgcattcatcagaaagtagttttccaggaagcttctttctagtttttatctgtagatatttatttcctttttcaccataagccttgaagcactcccaagtatctcttcacagattctacagaaacagcattgtcaaactgctcaatcaaaaaaaaagtttaagtctgtgagatgaatgcactcatcaccaagcagtttctcagaaagcttctttctagtttttatctgaatatatttcattttttacaataggcctcaatgtgctcccatatttcccttcacagattctacaaaaacagtgtttccaaagtgcttgatcagaagaaaagtttaattctgtgagaagattgcacacatcacaaagcagctgctgggaaagtttctttctagtatttatgtgaagatatttcctttttcaccatatgcctcaatgcacacctaaatgtcccttcccagattctacaaaaacagtggttccaaactgctcaatcaaaaaaaaggttttactctgtgggatgaattcactgatcacaaagcagtttctcagaaagctcctttctagtttttatctgaatgaatttcctttttctccataggccctaatgcactcccaaatatcccttcacagattctacgaaaacattgtttccacactgctccaacaaagtaatttttaactctgtgaaaagagtgcacacatcacaaagcagttttgacaaggtttctttctggtttttatctgaagatatttcctttttcaccataggccccaaagtgctctgaaatatccctacacagattctacaaaaacagtgttgccaaactgctcaataaaaaaaaaaagttttaactctgtgagatgaatgcactcatcaccaagcagtttctcagaaagcttctttctggtttttatctgaagctattacctttttcaacacaggcctcaaagcgctcccaaatatccctttgcagattctacaaaaacagtgtttccagactgctcaaacaaaataaaatcttaactctatgtgatgaattcacacatctggagcagtttctcagaatgctactttctagttttttttttttttctttttgagacagagtcttgctttgtctcccaagctggagtgcagtagtgcaatctcggctcactgtaagctctgccttccgggttcacaccattcttcctcagcctcctgagtagctgggactacaggcgcccaccaccatgcccagctaatttttttgtatttttagtagagactgggtttcactgtgttagccaggatggtctcgatctcctgacctcgtgatccaccctcctcggcctccaaaagtactgggattacaggcatgagccaccgcaccgggccctgctactttctagtttttatctaaagatatttcctgtttcacctatggcttcaatgcagtcccaaatttcccttggtagattttacagaaacagtgtttccatagtgctcaatcaaaataattatttacctttgtgcaaggaatgtacacatcacaaagcagtttccagaaagcttcttttctgtttttatcagaagatatttcattttcaccacaggccttgaagcgctccaaaatatcccttcgcagattctacaaaaacagtgtttctaaactgctcaagcaaaagagaggttttactctgtgagatgaatgcactcataaaaatatggtttctcagagagcttacttctagtttttatctgaagatattttctttttcaccataggcctcaatgcgctcccaagtataccttcacagatactaccaatacagtatttccaaaatactcaatccaaagaaaggtttaattctgttagatgaatgcacaaatcacgaagcagtttctgagaaaccttctttctagtttttctctaaagatatttccttattcaccataggcctcaaagcattaccaaatatcccttcacagattctacaaaaacagtattgccaaaccacgcaatcaaaaagatttaactctgtgagatgaatgcactcatcaccaagcagtttctcaaaatgactctttccacttttaatctgaagatatttccttttcaccataggcctcagcacactcccagatatcccttcgcagattctacaaaaacagtggttccaagctgctcaatcaacagacagttttaactatatatgatgaatgtgcacatcacaaagcagtttctgagaaagcgtctttctagcttttatctgaagatacttccttttgcaccatgggcctcagtgcactcccaaatataccttcatagattctaccaaaacagtgtttccaaactgctcaatcaaaagaaaggtttaactctgtgagatgaatgcacacatcacatagcagtttctcagaaagcttttttctagtttttccctgaagatatttcctttttcactatatgcctcaatgagctcccctatacctcttcctagatactacaaaaacagtgtttccaaactgctcaatgaaaggaaagttttaactctatatgatgaatggacacatcataaagcactgtctcagcatctgtctttctactttttatctgaagatatttcctttttcaccattgacttcaaagtactccaaaatatctcctcgcatattctaccaaaacagtgtttccaaattgctcaatgaaaagaaatatttaactctctgagatgaatgcactaatcattaagtagtttcccagaaagcatctttctagtttttacctgaagatatttcctttttcaccatagtccccaatgccctcccaaatatcccttcacagattctaccaaaacagtgtttccaaactgctcaaccaaaagaaaggtttaactctgtgagatgaatgcacacatcacatagcagtttctcagaaagattttttctagtttttccctgaagatatttcctttttcactataggcctcaatgagctcccctataacccttccgagatactacaaaaacagtgtgtccaaactgcttaatcaaagaaaggtttaactctgtgagatgaatgcactcatctcaaagcagtttctcataaagcttctttctagtttttatctgaagatatttctttttcaccataggcctgaatgcactcccaaatatcccttcacagattctaccaaaacagtgtttccagacttctcaatcaaaagaaagttttaattctatgagaagaatgcatacataataaagcagtttctgataaagcttctttctagtttttatctgaatatatttcctttttcatcacaggcctcaaagagctcccaaatatcccttcacagatcctaccaaagcattgtttccaaactgatcaatcgaaagaaaggtttaatgctttgagatgaatgcacacatcacatagcagtgtctcagaaaactttctactttttctctgaagttatttcctttttcaccatagcatcaacgtgattccaaatattccttcacagatactaccaaaacagtgtttccaaaatgctcaatcaaaagaaaggtttaactctgtcatttgaatacacgcatcacaaaacaacctctcagaaagcttccttatactttctcactgcagatattttgttttctaacataggtctcaatgcgctcccaaatataccttcgcaaatattataaaaacaatgttttcaaactgcttaatcaaaagaaagttttaagtctgtgagatgagtgtactcatcacaaagcagtttctcagaaagcttctttcaagtttttctccaaagatatttcctttttcaccatagccctcaacgtgctccaaaatgtcaatttaaaggttctacaaaaccagtgtttccagacagctcaatcaaaagaaaggtttaactctgtgagataagtgcacacatcatttagaagtttcccagaatgcttgtttctagtttttatcttaagcgatttcctttctcaccataggccttaaagcactgccaaatatcctttctcagattctacaaaaaaacagtgttgcaaaactgctccatcaaaggaaaggtttaactctctgtgatgaatccactcatcacaaagtagtttctcagaatgcttcttactagtttttatctgaagatatatgttttttcaccataggcctcaatgcgctcccaaaaatccctttgcaggttctaccaaaacagtgtttccagactgctcaatcaaaagaaagatttaactctcttagaagaatgcacacctttgtggagccaagttggctgaaaaggaactgctccagtctacatctcccagcatgagtgacacagaagacgggtgatttctaaggtcaaactgggtggagcccaccacagctcaaggaggcccgcttgcctctgtaggctccacctctgggggcagggcacagactaacaaaagacagcaataacctctgcagacttaaatgtccctgtctgacagctttaaagagagtagtggttctccaagcacacagcttgagatctgagaacgggcagactgcctcctcaagtgggtccctgatccctgagtggcctaacaaggaggcaccccccagtaggggcagactgacaacacacaggaccaggtactcctctgagacaaaacttccagaggaacgatcaggcagcagcatttgcacttcaccaatatctgctgttctgcagcaaccactgctgatacccatgcaaacagtttacggacatccagcaaactccaacggacctgcaggtgagggttttgactgttagaaggaaaattaacaaacagaaaggacatccaaaccaaaaacaaatctgtacatcactatcatcaaagaccaaaggtagataataccataaagatagggaaaaaacagaccagaaaaactagaaacgttaaaaatcagagtgcctctcctcccccaaaggaacgcagctcctcaccagcaatggaacaaagcaggatagagagtgactttgatgagctgagagaagaaggcttcagacaatcaaactactctgagctaaaggaggaagtaagaaccaatgacaaagaagttaaaatctttgaaaaaaaaattagacgaatagctaactagaataaccaatgaagagaagtacttaaaggacctgatggagctgaaaaccacggcatgagaactacgtgacgaatgcataagcctcagtagctgatgcgatcaactggaaggaagggtatcagtgatggaagatgaaatgaatgaaatgaagtgtgaagagaagcttagagaaaaaagaataaaaagaaacaaagcctccaagaaatatgcgactatgtgaaaagaacaaacccacgtctgattagtgtacctggaagtgacagggaaaatggaaccaagttggaaaacactctgcaggatattatccaggagaactttcccaatcttgcaaggcaggccaacattcagattcaggaaatacagagaaggccacaaagatactcgttgagaagagcaacttaaagacacataattgtcagattcaccaaaattgaaatgaaggaaaaaatgttaagggcagccagagagaaaggttgggttacccacaaagggaagcccatcagactaacagcagatccctcgccagaaactctacaagtcagaagagagtgggggccaatattcaacattcttaaagaaaagaattttcaacccagaattttatatccaaccaaactaaccttcataagtgaaggagaaataaaatactttacagacaagcaaatgctgagagactttgtcaccaccaggcctgccctaaaagagctccaaatagaagcactaaacatggaaaggaacaaccggtaccagccactgcaaaaacatgccaaattgtaaagatcttcaaggctaggaagaaactgcatcaattaacgagcaaaataaccagctaacatcataatgacaggatcaaattcacacataacaatattaactttaaatataaatgggctaaatgctccaattaaaaggcacagactggcaaattggataaagagtcaagacccatcagtgtgctgtattcaggaaacccatctcatgtgcagagacacacataagctcaaaataaagggatggaggaagatctaccaagcaaatggaaaataaaaaaaggcaggggttgcaatcctagtctctgataaaacagactttaaaccaacaaagatcaaaaaagccaaaaagaccattacataatggtaaaggaatcaattcaacaagaagagctaactatcctaaatacatatgcacccaatacagaagcacccagattcataaagcaagccctgagtgacctacgaagagacttagactcccacacaataataatgggagactttaacaccccactgtcaacattagacagatcaacgagacagaaagttaacaaggatatccaggaattgaactcagctctgcaccaagcagacctaatagacacctacagaactctcaaccacaaatcaacagaatgtactttgttttcagcagcacaccacacctattccaaaattgaccacatagttggaagtaaagcactcctcagcaaatttaaaagaacagaaattataacaaactgtctctcagaccacagtgcaatcaaactagaactcaggattaagaaaatcactcaaaactgctcaactatattgaaactgaacaacgtgcccctgaatgcctactgggtacataatgaaatgaaggcagaaataaagatgttctttgaaaccaacgagaacaaagacataacataccagaatctctgggacgcattcaaagcaatgtgtagagggaaatttatagcactaagtgcccacaagagaaagcaggaaagatccaaaattgacaccctaacatcgcaattaaaagaactagaaaagcaagagcaaacacattcaaaagctagcagaagacaagacataactaagatcagagcagaactgaaggaaatagagacacaaaaagcccttcaaaaaatcaatgtatcccagagttggtttttgaaaagatcaagaaaattggtataccactagcaagactaataaagaagaaaagagagaagaatcaaatagacacaataaaaaatgataaaggggatatcaccactgatcccacagaaatacaaattatcatcagagaaaactataaacatctctacacaaataaagtagaaaatctagaagaaatggataaattccttgacacatacatcctcccaaaactaaaccaggaagaagttgaatctctgaatagactgataacaggatctgaaattgaggtaattattaatagctttccaaccaaaaaaagtccaggaccagatggattcccagccgaattctaccagaggtacaaggaggaagtggtaccattcctcctgaaaatattccaataaatagaaaaagaaggaatcttccctaactcattttatgaagccagcatcatcctgataccaaagccgggcagagacaaaacaagaacagagaattttagactaatatccttgatgaacattgatgcaaaaatcctcaacaaaatactggtaaaccgaattcagcaacacatcaaaaagcttatccaacatgatcaagtgggcttcatccctgggatgcaaggctggttcaacatacgaaaatcaataaacataatccagcatataaacagaatgaaagacaaaaaccacatgattatctcaatagatgcagaaaaggcctttgacaaaattcaacaacgcttcatgctaaaaactctcaataaattaggtattgatgggacgtatctcaaaataataagagttatctatgacaatcccacagccaatatcatactgaatggacaaaaactggaaacattccctttgaaatatggcaaaagacagggatgccctctctcaccactcctattcaacatagtgttggaagttctggccagggcaatcaggaaggacaaggaaatacacggcattcaattaggaaaagaggaagtcaaataattgtccctgtttgcagatgacatgattgtatatctagaaaaccccactgtctcagcccaaaatctccttaagctgataagcaacttcagcaaagtctcaggttacaaaatcaatgtgcgaaaatcacaagcattcttatacacaaataacagacaaacagagagccaaatcatgagtgaactcccattcataattgcttcaaagagaataaaatacctaggaatccaacttacaagggatgtgaaggaccttttcaaggaaaactacaaaccactgttcagtgaaataaaagaggatacaaacaaatggaagaacattccatgctcatgggtaggaagaatcagtatcatgaaaatggccatactgcccaagataatttacagattcaatgccatccccatcaagctaccaatgactttcttcacagaattggaaaaaactactttaaagttcatatggaaccaaaaaaagagcccacattgccaagtgaatcttaagccaaaggaacaaagctggaggcatcacgctacctgacttcaaactatactacaaggctacagtaaccaaaacagcatggtactggtaccaaaacagagatatagaccaatggaacagaacagagccctcagaaataatgttgcatatctacaactatctgatctttgacaaacctgagaaaaacaagcaatggggaaaggattccctatttaataaatggtgctgggaaaactggctcgcgagaagtaaagagctgaagctagatccgttctttacacgttatacaaaaattaattcaagattgattagagacttaaacgttagacctaaaaccataaaaaccctagaagaaaacctaggcattaccattcaagacataggcatgtgcaaggacttcatgtctagaacaccaaaagcaatggcaacaaaaacaaaagttgacaaatgggatctaattaaactaaagagcttctgcacagctaaagaaactaccatcagagtgaacaggcaacctagagaatgggagaaaatttttgcaagctactcatccgacaaagggctaatatccagaatctacaatgtacccaaacaaatttacaagaaaaaaacaaacaaccccatcaaaaagtggacgaagtatatgaagacagacttctcaagagaagacatttttgcagccaaaaaacacatgagaaaatgctcataatcactggccatcagagaaatgcaaatcaaaaccacaatgagataccctctcacaccggttagaatggctatcattaaaaagtgaggaaacaacaggtgctggagaggatgtggagaaataggaacacttttacactgttggtgggagtgtaaactagttcaaccattgtggaagttagtgtggcgattcctcaggaatctagaactagaaataccatttgactccgccatccgattactgggtatatgcccaaaggattataaatcatgctgctataaagacacatgcacacatatgtttattgcagcactattcacaatagcaaagacttggcaccaacccaaatgtccaacaatggtagactagattaagaaaatgtgacacatatacaccatggaatactatgcagccataaaaaatgatgagttcatgtcctttgtaaggacatggatgaaactgaaagccatcattctcagcaaactattgcaaggacaaaaaaccaaacactgcattttctcactcataggtaggaattgaacaataagaacacatggatagagtaaggggaacatcacacactgtggactgttgtgggtgggggaaggggggagggataacgttaggaggtatacctaatgctaaatgacgagttaatgtatgcagcacaccaacatggcacatgtatacatatgtaacatacctgcacgttatgcacatgtaccctaaaacttaaagtataataataataaaataggaaaagaagaatgcacacatcacaaagccttttctgagaaagcttatttctagtttctatctttagatatttcctttttcaccattggcctcagtgcgctcccaaatactccttcatagatgctaccaaatcagtgtttccaaagtgtttagtcaaaagaaagctttaactctgtgagatgaatgcacacatcacaaagaagtttctcagaaagcttttttctagtttttctctgaagatatttcctttttcaccataggcctcaatgtgatcccaaatatccctttgcagattccaccaaaacagtgtttccaaactgctaaaccaaaagaaagctttaactctgtggtttgaatgcacacaataaaaggagtttctcagaattctttctagtttctcactgcagatatttcctttttcaccataggcctcaatgagctcccaaatatcccttcacagattctccaaaaacaatgttttcaaactgctcaatcaaaagaaaagtgtaactctgtgagatgaatgcatacatcacgaagtggtttctgagaaagctcatttctcatatttatctgaatatatttcctttttcaccattggcctcaatgtgctgtcaaatatcccttctcacattctacaaaaactgttgccaagccactcaatcaaataaaagtttaactctgtgaaatgaacacaagcatcacaaagcagtttctcagaaagcttctttttaattttttttgaagagatttcctttttcactgtaggcctcaaagcactccaaatgtcaatttgcagattctacaaaatcagtgtttccaaacagctcaatcaaaagaaaggtttagctgtgtgagataaattcacacatcatgaagcagtttcccagaaagcttctttctagtttttatctgaagatctttcctttttcaccataggccttaaagcacttccaaatatcccttctcagattctacaaaaaaacagtgttgccaaactgctccatcaaaagaaaggtttaactctgtgagatgagtgcactcatcacaaagtagtttctcagaaagtttctttctagtttttatctgaagatatttcctttttcaccataggcctcaatgtgctcccaaaaatcccttcacagattctaccaaaacagtgtttccagactgcttaatcaaaaggaagatttaactctgtaagaagaatgcacgcatcacaaagtggtttctgagaaagcttctttctaatttctatctttagatatttcctttttcaccattggcctcagtacgctcccaaatattccttcgcagatgctaccaaatcagtgtttccacagtgcactatcaaaagaaagttttaactctgtgagatgaatgcacacatcacaaagaagttcctcagaaagctttatttctagtttttctctgaagatatttcctttttcactgtaggcctcaatgtgagcttaaatatccctttgcagattctaccaaaacattgtttccaaactgctcaatcaaaagcaagttttaactctgtgatctgaatgcacacaatacaaagcagtttttcagaattcttctttctactttctcactgcagacatttcctttttcaccataagccccaatgagctcccaaatatcccttcacagattgtacagaaacagtgttttcaaactgctcaatcaaaagaaaagtttaactctgtgagatgaatgcatacatgacaaagcagtttctgagaaagcttcttactagtttttatctgaagatatttcctttttcaccataggcctcactgcactcccatatatccctttgcagattctaccaaatgagtgttttcaaactgctgaatcaaaagaaaggtttaactctgtgagatgagctgcacatcacaatgtggtttcacatttattttccttctgatttttatctggaaatattgggctgttcaccataggagttaatgggttccaaaatgtctcttcacacagtctacaaaactagtgtttccaacctgatgaatcaaaagaatggtttaacccattgagctgaatccacacttaacaaagtagtttcacagatagcttcttgatagtttttatgtggagatattcggtttctcatcataggcatctatgggcttatatatgttccttcgcagattctatctaaagggtgtttccatcctgttgtatcaaaagaaaggtttaactctgttcaatgaatccacacatcacagaacacttcacagatagtttctttctagtttttatctgggaatattttgtttttcacaataggcctcaaggggctccaaaatgtcccttcacagattctgcaaaatgagtgtttcaaacctgaggattcaaagaaaaagtttaagtctgtgagataaatccacacatcaacaaaggagtttcactgatagcttttttctagtttttatctgaggatatctttttttttcaccataggccacaatgggctgtgatatgtccctagtgagattctacgaaaacaatgttttcatcctgctgaatcaaaagaaaggtttaccttggtgagataaattgaaacttcacaaagcagtttcaaagacagctcctttttagtttttatcttgggatattttgtttgccaccctaggcctcaaagggctccataatatcccatcgccaattccacaaaatgagtgtctcccaactactggatcaaaaaaaaagtttaaacctgtgagatgaattgcacatcacaaagcaatttcacagatagcttccttctggtttttatctggaaatattgggttgttcaacataggactcaatgggctccaaaaaggctcttcacagagtctacaatatgagtgattacaacctgatgaatcaaaagctatgtttaactctgtgatgtgaagtcatactttaaaatgcagtttcacagatagcttctttctagtttttatcaaggtatattcagtttttcacaataggcctctaagggatcccagatttcccttggtagattctaccaaaagagtgattccaacttcctgaatcaatataaatgtttaactctgtaagataaatctagacattgtaaataagttaaacaggtagcttctttctagtttttatctggagttattgagtttttcaccataggcctctatgggctcttaaatgtccctttgcagatgctaactaaagactttttcatacctgttgtgtcaaaagaaatgtttaactctgtgagatgaatccatacatcacaatgcagttacacatttagcttttttctactttttatctggggatattctgttttttaccataggcctctatgggctcttaaatgtccattcacagattccatctaaaaaatgtttcaaacacgctatattgacagaaatgtttaactctgttagatgaataaatacatcccaaacagtttcacaaagagcttccttctagtttttatcaggggatttttttttcattataagcctcaaaggtctctcaaatgccccttcccagattgtacaaaaaggtgtttcaaacctgctgaatcaaaagaaaggtttaactctatgagatgaatccactcaccacagagttcattcactgatcccttctttctagtttttatcttgaaatatttgtgtgtgtgtgtgtgtttttaccatagacaatagtgagctcacaaatctattttcatagattctagcaaaagagtgtttgcatcatgctgagtcaaaagaagggtttgagtctttgagatgaatccacacatcacaaagcagttttaaagatagcttctttctggtttttacctgggaatatttgatttttcaccatgtactttaatgggctcccaaatgtcactatgcagattataaaacaaaaacatttgcaacctgttgaatcaaaacaaagttttatctcactgagatgaatccacacataccaaagcagttagacagattacttctttttagtttttatctggggatattcagtttttcaccttaggcctctatgggctcccaaatgtctttccactgattctaccaaatgagtgtttccaagctactgaatcaaaagaaatgtttaactctgtgagatgaatccacacattgaaaagcagttttacagacggagtccttctagtttttatcttggaatatttggttattcaccagaggcccaaaaaccgctacaaaatatccattcatagattctaccaaaagagtgtttttaaaatgctgaatgaaaagtagggttgaactctgtgagatgaatccacacatcaaaaagcagttttacagacagagtccttctagtttttatcttggaatattcggttattcaccagaggcccaaaaaccgctacaaagtgtccattcgtagattctaccaaaagagtgtttttaaaatgccaaatgaaaagtaaggttgaactctgtgagatgaatccacacatcacaaagcagtttcacaagtagcttgtttttaattttgagatattcggtttttcaccgtagtccgtaaagtgctcccaaatgtctcttggaagattctaccaagaaagtatttccaacctgttgaatcaaaagataggtttaactcagtgagatgaattcacatatcacaaaacagtttcacagatagattccttcaagtttttatcggattatattgggttcttcaacttaggtctctatgggctcccaaatacctctctgcaggttctacaaaacgagtgtttccaagctgctgaatcaaaagaaatgtttaactctgtgagatgtatccacatatcacaaagaggtttcactgatagcttcttcctagtatttatattaagatatttaattttttaacataggcctctgtaggcttccatatgtcccttcacagattcttccaaaaaagtgtttcaaatctgctgtatcaaaagaaaggtataagtctgagatgaatccacatatcaaacagcagtttcactgataatttctttctagtttttatctgtggatattctgtttttcaccataggcctctaagggctcacaaacgtcattttgcggaatctccaaaaagagaatttccaatctgttgaatcaaaaaaggtttaactctgtgaggtgaatccacgtatgacaaagcagtttgactgatagcttcttcctagtttttatctggggatattttattttcatcataggcctcaaagtgctcccaaatgtaacttcacagattctacctgaagagggagttgcaggaagtcagggaccctgaactgagaactgaggcacccgctgaagccatggcagaagaacatgaattgtgaagatttcatggacatttattagtttcccaaattaatacttttataatttctcacacctgtctttactgcaatctctgaacataaattgtgaagatttcatggacatttctcacttccccaatcaatactcttgtgatttcctatgcctttctttactttaatctcttaatcccatcatgaccctgtgatgattctgttaactgcacaaattgtttaaacaatataaaatctgggcaccttgaaaaaagttcatagtaacaacgatgttcagggaccaagggagataaccattagttctggctgcctgagacctgggtggaacagagccatatttctcttctttcaaaagcaaataggagaaatatcactgaattctttttcttgacaaggaacagctctgagaaaaagaatgcattcctagggataggcctctgaaatgactgctccgggaaaatctgtcttttacggttgtaggtaagggatgaaataagcccagtctcccatagcaggcttattaagacgagaaaattcctgcctaataaattttagtcagaccagttgtctgttctcaaaccctgtctcctgacaagatgttattagtgacaatgtgtgcccaaaacttcattagcatttttaattttgccctagtgctgggtgatctcaccctgcctctatttgccttgtgatattttattaccttgtgaagcaagtgatctctgtgacccacaccctattcctatactccttccccttttgaaaatcactaataaaaatttgctggttttatggctcaggtggcatcatggaacctgccgacatgtgatgtctccccgggaaaatagaaaagaacccacaaagaattattggaggtcggatcccctaatatctggtgcaccaacgtggttttttccttttcccaagtgcatgtgggaacccgattcccttttgtaggtgcacagaaacgtcattggtttggtccacagaaatgcaggttcgactccctgacaactggtgagtagcctctgtatggtctgggttaactgtgggttacacggagtataaaaattatactcatctcttctatattaaactccagttaaaacagaaaagggttcgagtgcccatggaaaacatggtaaccatggaaaatatggtcactctattcagggtggtggaaaaatactgtccttggtttcctggaaaaggaactgtatatgtaaaagtaagggattgtgttggtgcaacattccaggaactggtctggacaggaaattatgttcccatcactgtttgggggtgattgggacttggtaagtgccatcctaatacctcctcaactttcctctcccgcacggccttcattatctgatcagcctctccctttgcctactcctcccccatttaatgatgctgagacttcaatatctaactctgctgactttggctgaatgctaacccctacttatcttacttcttttcatgaagagctggtacttgaagctcccgtggccatgactcacacagcccaggaccataggtatgctaattcttctctcctcaagcctccagcatcagataatggctccagcagcaaactacaatttacctataattctccaggccctcccccatccactacagcccctcaccctcctgtcattttggttcctcaaccagccactttgccatccactcaacctgcttgtctgtagccttcttcacacatggatgccagtcatcatcagtatacctctgcctcttttactccttcaatgtccctttctcacattctcaaactagtctgcatcagtatgtgggactcaatcttacctttttaaaagaatttaaggattcttgtactcagtatggtcctacttctcctaatgttaaaacagcattacaaactttgtgtggaggcaactttgcttcctttagactgggaccttttgacataagctcttctaaccccatctcagcctggcgggcagagaagggccatctccaggctcagctaaatcagactaatggcattctaattactcaggctcagctcacaggctctgatagtttctctgatacttatgcccaattaggctttgatgctcttaccagaaaacaagtaacaaaggtgtgtatgagagcttgcaatacattacgtgccccaggccaagctcctgtttcttttactactgttaaagaagttcaattacttttactacctaatatcattttaaacaaatgagataagacacgtggccctgggattggcttctgtggtgaaaaggctgcttattggattaatgtaatttctaaacaatggcccacccacaccatacacattcctggaaaaaagtttgagggcctagtagatactgaggctgaaattaatattccacataactcttatggtactccccatcagcatgtgatggaaaacatgttgttttttcctggactcggtctcagtgcaaaacatgaagggattactaaacccctcccaattactgtaaaataagacagtaatggtttaggttatcctttttagtggcagccactgccacgcctcctgatcctatccctttacaatggaaatctgacacacccgtttggattcagcagtggctgctttctaaagaaaaactggaggctttaactcactttgtttctaaacagttacaacctcgaaatgtggaaccttatctttccccctggaagtctcctgtgtttctagtaaaaaagaaatcaggcaagtggcagatggtaactgatttaagggccattaaccctttaattaaacctatgggtgccatccaagatggcatgcctgcccctgctttaatacctaaaaattagcctctcatagttattgatcttaaagattgtttttttcatatttctttacataaatcagattgtgaaaaatttgcttttgctgtaccatctatcaataagtaggagcctgcagctcattatcaatggaaagtacttcctcagggaatgctaaatagccctacaatctgccacgtttatgttgggcaattgctttcaccagttcaagcccaatttccccaggcctatattcatcattatattgatgatatttaattactggccccactgataaagaattaatggactgttatcaaattttttgccacgatgttacagagcctggattacccatcactcaggataaaatttaacagaccacccgtgttcaatatttaggaatggtggtcgataaacaacgtattcaacctcaaaaagttcacattaggagagattctttgaaaactttaaatgacttccaaaaacttttgggtgacattaattatttaagacctactttaggcattctgacctatgcgttgtctaacttgttttctgtgctttggggagattccaatctcggcagtcccagaactttgacccctgaggcttcactagaactggaattcatagaggaaagaatccagatggcccagttatctagaatacatccgtttcaaccttttcagcttctggttttcgcttcattacattcccctatgggactaatcgttcaacataatgatttagtggagtgatgttttcttcctcactatgtgtcaaaaactttgattatctggaacaactggccatcttaattggacaagctcagtgcaaaatatttaaaatttccagattttttccaaatttgactgtagttcttttaaatcaccttgaagttcagccccctttcaacattacctactgtgtcaaattcacttgactgattttattggtgttactaacaatcattatccaaagaacaaattgtttaattttataaaaatgactccttgggtggtccctcgattaaccaaagatcagcccatttgtgaaaccgttacagtgttctctgatagttcttgtaatggcaatgatggttgtgtaggtcgtacagataagcttatttttacctctatatctctgctaaaaaggtagagttgattgctgtaattactgccttacaggatttccccaaacctttaaatattgtctctattctacttaatgtgggaaagaggatatgcttgtgttttgccaggagatcaccaaaaaaaaccacagagaaaagacgtccacgtcaccaaacgccctcagacgtggtgagatctgtgccaactcctcagaagttggcacaccaaatcaaaatgggtctgactcaaaccttcctgattgcaacggagacccatctaactaatcccacttcttctgattacctttctttttctccttaaaaatccaaaaatctcaccatttatattagcaaaaaaatgacatccctttgttcttctcttcctccttcaccactaaatctcgcttacactaggttttatttaattattctcctccttatactttctctctcaccagtttcctttcacactgatttacctactacacaaaattattcttattgggcttatgtgccttttcctccacttattcgacctctcacctggaatgatgctcctgcagtaatctgcactaacgatagtgtgtggctgcctggagctgcagaagaacattgccttgctcaaccaggagaagaaggcacagcatttaatgttaccattcattataaatacccacctctgtgcctcggacatgcacctggttgtatccatctagaaattcaagtgtgggttgcttgtcttctggagaaatcagctacagaggaactggacatttggtctctggcctctccctttatcctttaaaacaaatgaaagggggagtaacgggagataccccatactttcaatataaacttgcaggaaaaccatgttctaaaaattttgaaggcccacctacaaccttaatttgggaagattgtgttaactcacatgcagtaatattaaaaaagactcgtatggtttagtaatagactgggcacaaaagggctatttaaaaaaaattgcttctctggcagaaaggaatacctgaagggtacttattttatttcttattgggagaactagaatcatcattctactttgcataggaggttcaactcattctttcccttaaaatgggaagataaaggcattaccccccgaggccttgtatgatactccccattctgagcccagaacacccagaactttggaaatttgctattgacatgtctgtactgtgagtaggggaaggggaaactattctgtctgttgtccccactactgtccccctctctcagcatcaacatagatccagacattctactttacttacctccatcctgatggttcccatatacagttttgttaagcttccttacatgctgttagtgggaaatatcaaaatttgaacgaacagtcagagtacccaatgcattaattgtcatttataaacttgtattaacttccattttgaccccaggaaaagtgtaacgtttgttcgagcttgagaaggaatgtggattcaggtaactttgcccagaccttgagaatactccctgtcaatacacttaattaatgaagtgatacagtgaattctaaaaagatctaagagatttgttttcactttaatcgctgtgatcatgggcctataccccactgctggaatggcactacatcaatctactcaaacagctccttttgttaatgattggcaagccaattccactcaaatgtggaattctcaacaaggcattgaagaaaaattcgctaatcaaatcaatgacttaagacagtgtgttctgtcccattgatctatatctctgttttggtaccagtaccatgctgtttgggttactgtagccttgtagtatagtttgaagtcaggtagagtgttgtctccagctttgttcttttggcttaggattgacttggtgttgcaggctcttttttggttccatatgaactttaaagtagctttttccaatactgtgaagaaagtcattggtagcttgatggggatggcattgaatctataaattaccttgggcagtatggccattttcacgatattgactcttcctacccatgagcatggaatgttcttccatttgtttgtatcctcttttatttcattgagcagtggtttgtagttctccttgaagaggtccttcacatcccttgtaagttggattcctaggtattttattctccttgaagcaattgtgaatgggagttcactcataatttggctctctgtttgttattggtatagcgccgcatatctacaactatcagatctttgacaaacctgacaaaaacaagaaatggggaaaggattccctatttagtaaatggttctgggaaaactggctagccatatgtagaaagctgaaactggatcccttccttacaccttatacaaaaattaattcaagatggagtaaaggcttaaaagttagaactaaaaccataaaaaccctagaagaaaacctaggcgataccattcaggacataggcatgggcaaggacttcatgtctaaaacaccaaaagcaatggcaacaaaagacaaaattgagaaatgggatctaattaaactaaagagcttctgcacagcaaaagaaactaccatcagagtgaacaggcaacctacaaaatgggagaaaattttcacaacctactcatctgacaaatggctaatatccagaatctacaaagaactccaacaaatttacaagtaaaaagcaaacaaccccatcaaaaattgggcaaaggatatgaacagacacttctcaaaggaagacatttatgcagccaaaagacacatgaaaaaatgttcatcatcactggccatcagagaaatgcaaatcaaaaccacaatgagataccatcttacaccagttagaatggcaatcattaaaaagtcaggaaacaacaggtgctggagaggatgtgggaaataggaacacttttacattgttggtgggactgtaaactagttcaaccattgtggaagtcagtgtggcaattcctcagggatctagaactagaaataccatttgacccagccatcccattactgggtatatacccaaaggactataaatcatgctgctataaagacacacgcacacatatgtttattgtggcactattcacaatagcaaagacttggaaccaacccaaatgtccaacaatgataggctggcttaagaaaatggggcatatatacaccatggaatactatgcagccataaaaaatgatgagttcatgtcccttgtagggacatggatgaaattggaaattgtcattctcagtaaactatcgcaagaacaaaaaaccaaacaccacatgttctcactcatagatgggaattgaacaatgagaacacttggacacaggaaggggaacatcacactccaggtacagttgtggggttgggggatgggggagggatagcattaggagatatacctaatgctaaatgatgagttaatgggtgcagcacaccaacatggcacatgtatacatatgtaactaacctgtacattgtgcacatgtaccctaaaacttaaggtataataataataataataaaaagaaaaaaaagacaatgtgttatttggcttggagatcgggtaatgagtctcgaccattgcatgcaaattcagtgtgactggaatacttcagatttctgtataaccgtgtactcctataaagagactgatcattcatgggaaatggtcaaaggacaccttctgggtagggaaggtaatttatcattggacataactgaattaaaaacaaatttttgaagcctctgaatctcacttatccattatgcctagagctgaggcattagatcatgtggtagaaaacctttatggattaaaccccacgacttggattaggtctattgtgggctccactgaagtaaattttggaattatgtttctctgtttatttgcttgtctttagtgtgccagaccagtcaaagaatccagtgtcaaaatggagagaatgagcaagtgttcatcaacatggcacatttatataaaaagagaaggagaaatgttgcaggaagtcagggaccctgaatggagggactggctgaagccgtggtagaagaacataaattgtgatgattttgtggacatgtattagttccccaaattaatacttttataatttcttacatctatctttactgcaatctctgaacataaattgtgaagatttcatggacatttatcacttcccaaaccatacttgtgtgatttcctatgcctctgttaaatctcttaatcccatcatcttcataagctgaggatgaatgttgcctcaggaccctgtgatgattgtgttaactgcacaaattgttaaaacattatgcaagctgggcaacttgaaaaaagcacaagataagagagatgttcagggaactagggagataaccattatgtctggctgtctgagagctgggcagaacagaaccatatttctcttttttcaaaagtaaataggagaaatatggctgaattctttttctcagcaaggagcagccctgagaaagagaatgcattcctaggtgtaggcctttgaaatggccactctgggaatgtctgtcttttatggatgtagacaagggatgaaataagccctggtttcccgcagtgctctgaggcttattaggatgaagaaatacccacctaataatattggtcagaccagttgtctgttctcaaaccgtgtctcctgataagatgttatgaacaacaatgtgtggccaaaacttcattagcaattttaatatcaccccagtcctgtgatcttgccctgcctgcatttgccttgtgatattttattaccttgtgaagcacgtgatctctgtgacccacatcttattcgtacataccctcccattttgaaaatcattaataaaaacttgctgggtttatggctcagggggcatcacagaacgtgccaacattgtgatgtctcccccagacactcaactttaaaaatttctctctttttactctttccctttatttcttcgatgggttgacatttaggggaaatagaaaaggactcacgttgaaatatcaggagctgattttcccctgatagagagtttcaaacccactatatcaaaatcaaaatttaattctgtaagatgaatacacacatcataaagcagtttcaaagacagcttttttctagtttttatctggggatatttggtttttcactataggcctcaaaaagctcccaaatatttcctcatacattctaaaaaaagagtgtttccaacatgctgaataaaaagaaatgttcaacattgtgagatgaaaccacatatcaaaaagcagtttaacaaagagtttattcctagttgttatctgtggacatttgatttctcaccaaaggactcaaaaggctttcaaatgtcccttcgcagactctacaaaagtactgtttgcaacctgctgaattaaaatgaagatttacctctcttggatgagtccatacatcacaaagaagtttctatgggttcttaaatgtctctttgcagattctacctaaagagtgtttcaaatctgttttaatgaaagaacaatttaactctgtgagataaatccacacattacaaagctgttttacagatagcttttttctagtttttatctggggatatttggtttttcaccataggccaccatgggctcccaaatgtcccttcatggattctaacaaaagagtgtttacaacctgttaaatgaaaagaaaggtttcaaactgtgagatgaatccacacatcacaaggcagtttcacagatagcagttttctagtgtttatctgggaatattcggtttttcaccacaggcctccatggattctcaaaagtttcttcacagattgtacaaaaagagtgtatgcaacttgctgattcaatagacaggtttatctctgtgaaatgaatccacagatcacagggctgtttcacagatcacttctttcttgtatgaatctgtgaacatttcgtttttctctgtaggtctcaaaaagctccatttttctctttgcagatcctgtgaaaacagtgtttcaaacatgatgtatcaaaagaaacgttgacctctgtgagaagaatccacacatcacaaagaagtacacagatagctacttcctagtttttatatgaggattttttttttaaccatacacctcaaagggcttcaaaatgccccatgtagattctacacaactagtgtttccagcctcctgaattaaaggaaaggtttatctctgtgagatgaatccacacatcaaaaaagcagtttcacaaacagcttctttctggtttgtgtctgggggtattcggtttttcactgcttcctgaaagggtttccaaatgtacctttgcagattccataaaaagagtgtttttaatctgctgaatcaaaagaaagatttaactttgtgatttcaatccagatatcacaaagcagtttcacagatagcttctttcagtttttatctggggatatttggtcttttaccataggcctctaaggactctgaaatgtcccttgaaagattctaccataagagtttttccaatttaccgagtcaaaagtcatgtttaactctgtgaaacgaatccacacatcacaaggcagtttcacagatagcttctgtcttgtttttgtctggaaatattcggtttttcaccaaaaaaatcatgggcttcaaaaagtccctttgcatatcctacgaaaagaggatttcacacctgctgaatcaaaacaaacgtttaattctgtgaggtgaatccacacatgacatgcagtttcagagacactttctttctagtttttatctgggcatattctgtttttcaccgtaggcctctacggtctcccaaatatcccttcgcttattctaactgaagagtatttcaaacttgctgaatcaaaagaaaggtttaactctgagtggtgaatccacacataacaaagcagttccacaggtagcttccttctggttttcaactggggatattgtttttttcaccatagcctcaatggacttcaaaatgtcccttctcaggttctacaaaacaagtatttccaaccagctgagtcataggacaggcttatctctgtgagacgaatccacacatcacaaagcagtttcacaggtagctactttgtagttttatctgtggatattctgtttttcaccatagggctcaaataccttccaaacctcccttctcagattctgccaaaaagtgtttccaacccacttaatcaaaagaaagatttaactctgtagatgaatccaaacatcgcagagaagtttcacaggtagcttctttctagtttatatatgggaatattcagtttttcaccataggtctcaatgggctcccacatgtccctttcccgattttaccaaaagagtgtttccaaactgctgaatcaatagaaaaatttaaatctgtgagtagattccatacatcacaaagtagtttcactaaaaccttctttctagtttttatctttcaatattcaatttttcacagtgtgccacaatgggctggcaatgtcccttcacagattctagcaaaagaatgtttgcaaactgctgaatcaaaagaaaggtttaagcctttgggctgaatccacacttaacaaagcagtttcacagagagcttctttgtactttttatgtggggatatccagtttttcaccataggcatctgtgggcttataaacgctcattcacaggttctatctaaaaagtatttctatcctgctgtatcaaaagaaagatttaactctgtgcaatgaatctacacatcacaaagcagtttcactgatagcttctttctaatttttatttggagatattcagctttccactataggcttaaaagggctcccaaatgtccctttgcagattctaccaaaagagtgtttccaacctgctgaatcaaaagataggtttaactcagtgaggtgaatccatacatcacaaagccgttacatatttagcttatttctactttttatctggagatattctgtttttcaccatagacctctatgggctcttaaatgtcccttcacagatactatttaaaaaatgtttgaaccatgctatattgacagaaatatttaactctgttagatgaataaacacatctcaagcagtttcacagtacttactttgtagtttttatctggggatttttgattcttcattacatgcttcaaagttctctaaaatgcccattcgcagattcttcaaaaaggtgtttacaatctgctgagtcaaaagaaaggtttaacactgtgagatgaatccacacataggaaagcagttacacagacagcttctttctactttttatctggggatattcagtttttcacctcaggcctctatgggctcccaaatgtctttccactgattctagcaaacaagtgtttccaagcgactgaatcaaaaggaatgtttaactctgtgaggtgaatccacatatcaaaaacagttttacagacagagtctttctagtttttatcttggaatattcggttactcaccagaggccagaaagcctctacaaaatgtcccttcatagattctaccaaaagagtgtttttataatgctgaatgaaaaggatggttgaactctgtgagatgaataaatacaagacaaagcagtttcacagatagcttgtttctagttttaatttgcagatatttggtttttcactgtaggctgtaaagggctcccaaatgtccctttgcagattctaccaagacagtgttttcaatctgctgaatcaaaagataggtttaacacagtgagatgaatccacacatcacaaagcagtatcacagatagattccttcgagtttttagctggggatattgtgtttttcaccttaggtctctatgggctcccaaatgtcactctgctggttccacaaaacaagtgtttccaagctactgaatcaaaagaaatgtttaaatctgtgagttgaatccacacatcacaaagaggtttcactgatagcttcttcctagtatttatatgaagatattcagttttttaacataggcctctatgggcttccatatgtcccttcacagattcttccaaagaagtgtttcaaatctgctgaatcaaaagaacggtttacctctgtgagatgaatccccatatcacaaagcagtctcactgataccttctttctcgtttttatctgtggatattctgtttttcaccataggcttctaagggctcacaaacgtccttttgcagaatcctcaaaaagaaggtttccaatctgctgaatcaaaagaaaggtttaaatctgtgaggtgcatccacacagtagaaagcagtttcacagatagcttcttacttgtttttatctggagttattttatttttcaccataggcctcaaagtgctcccaaatgtacctttgtagaatctacctaaagagagtttccaacctgttgtatcaaaatgaaattttaactctgtaagatgaatgcacacatcacaaagcagcttcaaagacagattttttcttgtttttatctgggaatattctgtttttcaccataggactcaaaaactcccaaatgtttcctcatacattctaaccaaagagtgtttccaacctgctgagtaacaagaaaggttcaacaatgtgagatgaaaccacatatcaaaaagcagtttaacagatagttttttcctagttgttatctgtggacacttagtttctcaccaaaggactcaaagggctttcagtgtccctttgcagactatgcaaaaatactgactgcaacctggtgaattaaaagaaagattttcttctcttggattaatccacacattacaaagaagtttcacagatagcctctttctagttttgatcttgtcatagttggtttgtcactatggactatggtgggcttgcaaatatcccttcaaagattctagaaaaagagtgtttttaaaccagtgaatcaaaaacaagtttaaccctttgagatgaatccacatatcactaagcagtttcacagagagcttctttgtagtttttatctgaggatattctgtttttcaccacaggcctctatgggttcccaaacctcccatcacagattctaccaaaagactgcttgcaatctgcttaataaaataaaaggtttaactctgtgagatgaatccacacatcataaaacagtttgacagacagcttctttctagattttatctgggaatattctgtttttcaccgtaggcctctatgtgtccccaaatgtcccttcacagattctacctaaagagtgtttcaaacatggtttatcaaaagaaaaattttactgtgtgaggtaaatccacacatcacaaagctgttttacagatagcttttttctagtttttatctcgggatattttgtttttcaccataagcccccaagggctctcaaatgtccctttgcagattctaacaaaagagtgtttccaagctgtgaaatgaaaagaaagatttgacactttgagaggaatccacacatcacaaagcattttcacagatagcttttttctagtgtttaaagtttcaccaataacttttttctagtgtatatctggggataatcagtttttcaccataggtctccatggactcccaaaagtttcttcactgattctacagaaagaatgtatgcagcttgctgattcaatagatgggtttatctctgtgaaatgaatccacagatcacaggactgtttcacagatagcttctttctagtttttatctgtgaacattgggtttttcatcataggcctcaaaaagctcccaaatttctctctgtggattctacaaatcagtgtttccatcatggtgtatcaaaagaaacgtttatctctgagatgaatccacacatcacaaagatgttcacagatagcttcttcctagttttatctgggaatatatatatatatatatatatatatatatatatatatatattttaacataagcctcaaagggcttcaaaatgctgcaagaagatgctacaaaatgagtgtttccaacctgctgaatcaaaggaaacgtttatctctgtgagatgaatccacacatcaaaaaagcagtttcacaaatagcttctttctggtttttatctggggatattcagtttttcactatattcctgaaagggttcccaaatgtaccctcaaagattctataaaaagagtgtttttaacctgcttaatcaaaagaaagatttaactttgtgatttgaatccagacatcagaaagcagtttcacagatagcttctgtctatcttttatctgaggatacttggttttttatcataggtctctaagggctccaaaatgtacctggaaaggttctgccataggagtgtttccaatttactgaatcaagagaaatgtttaattctgtgaaatgaatccacacatcacagggcagtttgacaggttgcttctttctactttttatcaagaaatatttgctttttcaccataaacctcaatgggcttcgaaatgtcccttcctaccaaaagagggtttcacacctgctgaatcaaaacagacgtttatttctgtgaggtgaatccacacatcacacagcagttacacagacagcttctctctagtttttatctgaggatactctgttttttagcataggcctctaaggtctcccaaatgtcccttcccatattctacttaaagagtatttcaaatttgctggatcaaaagaaaggtttaactctgagtggtgaatccacacattaaaaagcagtttcacaagtagcttccttctagtttgtaactggggatattgtttttttcacaatagacctcagtgggcttccaaatgtcccttctcaggttcttcaaaatgagtgtttcccacctgctgaatcaaaggaaaggcttatctctgtgacatgaatccacgcatcacaaagcagattcactgatagcttctttatagtttttattttgaaatatatatatatttttaccatcgactacagtgggctcacatatctctttttgcagattctagcaaaagagtgtttccatcatgctgagtcaaaagaaaggtttaagtttttgagatgaatccgcacatcacaaagcagtttcaaagactgcttctttctggtttttatctggggatatttggtttttccctatcagcctcaaaaaactcccaaatatttcctgatacattctaaccaaagagtgtttccaacctgctgagtaaaaagaaaggttcaacactgtgagatgaaaccacatatcaaaaagcagtttaacagatagtttcttcatagttgttatctgtggacaccaaaggactcaaaaggctttcaaatgtcccttcacaaactctgcaaaagtactgattgcaacctgctgaattaaaagaaaggtttacctctctggaatgaatccacatatcacaactttcacagatagcctctttctagttttgatcttgggatattcggttagtcactatggactacagtgggatcaaaaatgtccctttacagattctagaaaaagagtgcttctaacccagtgaatcaaaaacaagtttaaccctttgagatgaatccacatatcactaagctgtttcacagagagcttctttctagtttttatctggggatattctgtttttcaccataggcctttggggttcccaaacttcccttcacagattctaccaaaagagtgtttccaacatgcttaacaaaagaaaaggtttaactctgtgagatgaattgacacatcacaaaagagtttgacagatagcttctttctagattttatctggggacattctgtttttcactgtagacctctatgtgttcccaaatgtcccttcacagattctacctaaagagtgtttcaaacatggtttatcaaaagaaaaacttaactctgtgagataaatccacacatcacaaagctgttttacagatagcttttttccagtttttatctcgggatattttgtttttcaccaaaggcccccaagggctctcaaatgtccctttgcagattctaacaaaagagtgtttccaagctgttaaatgaaaagaaagatttgacactttgagatgaatccacacatcacaaagcagtttcacagatagcttttttcttgtgtttatctggagatattctgtttttcactataggcctccatggactcccaaaagtttcttcacagattctacaaaagagtgtatgcaacttgctgattcaatacacaggttaatctctgtgagatgaatccacagatcacagggctgtttcacagaaagattctttctagtttttatctgtgaacattgggtttttcaccatagacctcaaaaagctcccaaatttctctttgcagatactacgaaaacagtgtttcaaacacactgtatcaaaagaaacgttgacctctgttagatgaatccacacatcacaaagaagttcacagatagcttcttcctagtttttatatggggatattgtgggcttttttgtcatagacctcaaagggcttcaaaatgccccatgtagattctacaacacgtgtgttttcaacctgctgaatcaaaggaaaattttatctctgtgagatgaatccacatatcacaaagaagttcacagatagcttcttccattttttatggtgatattattattattatttttttaccataggccacaacagactccaaaatgccccatgcagattatacaaaacgagtgttttcaacctgctgaatcaaaggaaagttttatctctgtgagatgaatccacacatccaaaaagcagtttcccaaatagcttctttctgatttgtatctgggggtattttgtttttcacaacatttctgaaattgttctcaaatgtaccttcacagattctataaaatgagtgcttgcaaactgctgaatcaaaagaaaggtttacctttctgatttaaatccagatatcattaagcagtttcacagatagcttctttctagtttttatacttttttttttttttttttttttttaccataggcctctaagggctccaaaatattccttgaaagattctaccataacagtgtttccaattttcagaatccagagaaatttttaattctgtgaaacgaatccacacatcacaaggcagtttcacaggcagcttctttctagtttttttctagaaatatttggtttttcaccataaacctcaatgggcttccaaatgtcccttcgcatatcctaccgaaaaagggtttcacatccactgaatcaaaacaaacatttaattctgtgaggtgaatccacacattacacaacagtttcacagacaccttctttctagtttttatctggggatattctctttttcaacataggcctctatggtctcccaaatgtccctttgcatattctaactgaagagtattgcaaatttgctggatcaaaagaaaggtttaactctgagtggtgaatcctaacatcacaaagtagtttcacaggtagcttccttctagtttgtaactggggatattgtctttttcaccatatgtctcaatgggcttcatatgtctcttctcaggtactgcaaaatgagtttttgcaacctggtgaatcaaaggaaaagcttatctctgtgagatgaatgcacacatcaaaaagcagtttcacagatagctactttgtagtttttatctgtgaatattctgtttttcaccatagacctcaaaaagcttccaaatctcccttcgcagattctgccaaaaaagtgtttccaacgtgatgaatcaaaagaaaggcttaactctgtgaaatgaatccacacattgcagagcagtttcacagatagcttccttctagtttttatctggaaatattcggtttttcaccataggtctcaatgggcttgaacatgtccctttcccaattttgccaaaagagattttccaaactgctgaatcaatagaaaagtttaactctgtgagtaggatccacacatcccaaagtagtttcactaaaagcttcttgctagattttatcttcgaatattcaattttccacagtgtgctacaatgggcttgtaaatgcccctttgcagattctagcaaaatagttttcgcaacctgctgaatcaaaagagagctttaaacctttgagctgaataaacacttaacaaagcagtttcacagatagcttcttgatagtttttacgtggggttattcggtttttcaccataggactctatgggcttataaatgttccttcacagattctatgtaaagagtgtttccatcctgctgtatccaaagaaaggcttagctctgtgcaatgaatccacacagcacagagcacttcacagatagtgtctttctagtttgtatctggggatactttgtttttcacagtaggcttcaatgggctccaaaatatcccttcacagattctgccaaatgagtgtttcaaacctgcagaatcaaagaacggtttaagtctgtgaggtaaacgcacacttcaaaagaacagtttcactgatagcttctttctagttttcatgtagggacatttggtttttcaccataagcctaaaagggctcccatgtgtccctttgtagattctacaaaaagaatgtttccatccttttgaatcaacagagatttaactctgagataaaggtaaaaatcacaatgaagtttcagaaatagcttctttctggtttttatctggggatatctgttttttcaccataggcctcaatgggctatgataggtctgtgtgcagattctaccaaaagagggtttacaacgtgctgaatcaaaagaaaggtttaactctgtgagataaatccaaacatcacaaagcagtttcactggtagctccttttcaggttttatcttgggatgtttggttttcaaccataggctttaatgggctctgaaatatcccatcactgattctacaaaattagtgtctccaacctacttaatcaaaaacaaaaattttaaatttgtgagacgattcacacatcacaaagcagtttcactgatagctttcttctgctttttatctggaaatattgggttgttcaacataggacttaatgggctccaaaatgtctcttcacaaagtctacaaaaagagtgtttccaacctgatgaatcaaaagaaacgtttaactctgtggcatgaatccacactttacaatgcagtttcacagatagcttctttccagtttttatcaaggaatattcagtttgtcacaataggcctctaagggatcccagaattcccttggaagattctatcaaaagagtgattccaacttcctgaatcaaaataaatgtttatctctgtgagatgaatccagacattacaaataagctaaacaggtaccttcttcctagtttttatctgaagttattcagtttttcacaataggcctctaagggatcccaaatgtcccttggcagattctaccaaagggtgattccaacttgctgggtcaatgtaaatgtttatctctgttagataaatacagacattacaaataagttaaacaaatagcttctttcttgtttttatctggagttattgagtttttcaccataggcctctgtgggctcttaaatgtcccttcgcagacactaattaagactgtttcatacctgttgtgtcaaaagaaaggtttaactctgagaggaatccatacctcacaatgtagttacattttagcttttatctactttttgtctggggatattctatttttcaccataggcctctatggactcttaaataccccttcacagactctatctaaaaaatgtttcaaacatgttatatagacagaaaaattaaactctgttagatgaataaacacatcccaaacagtttcacaaagagcttccttctagtttttatctggggatttttggatttttttttgttttcttattatactttaagttttagcgtacatgtgcacaacaaacgtgccggtttgtaacatatgtatacatgtgccatattggtgtgctgcacccattaactcatcatttagcattaggtatatctcctaatgctatccctcccccatcctcccaccccacaacaggccctggtgtgtgatattcccctgcctgtgtccatgtgctctcattgttcaattcccacctatgagtgagaatatgcggtgtttgtttttttgtccttgtgatagtttgctgagaatgatgtttccagcttcatccgtgtccctacaaaggacaagaactcataattttttatggctgcatagtattccatggtgtatatgggccacattttcttaatccagtctatcattgttggacatttgggttggctccaagtctttgctattgtgaatagtgccacaataaacatacgtgtgcacgtgtctttatagcaacatgatttataatcctttgggtatatatccagtaaggagatagctgggtcaaatggcatttctagttctagatccctgaggaattaccacactgacttccacaatggttgaactagtttacagtcccaccaacagtgtaaaagtgtttctatttctccacatcctctccagcacctgttgtttcctgactttttaatgatcaccattctaactggtgtgagatgttatctcattccttctcctgcctgattgctctggccagaacttccaacactatgttgaataggagtggtgagagagggcttccctgtcctgttcctgctttcaagggaatgcttccagtttttgtccattcagtatgatattagctgtgggtttgtcatagatattattatttgagatacgtcccatcaatacctaatttactgagagtttttagcatgaagtgttgttgaattttgtcaaaggccttttctgcatctattgagataatcatgtggtttttgtctttggttcttgtttatatgctggattatgtttattgattttcgtatgttgaaccagccttgcatcccagggatgaagcccacttgattatggtggataagctttttgattgctgctggattccgtttgccagtattttattaaggatttttgcatcgatgctcatcaaggattttggtctaaaattctcttttttggttgcgtctctgcccggctttggtatcaggatgatgctggcctcataaaatgagttaggcaggattccctctttttctattgattcgaatagtttcagaaggaatggtagcagctcctccttgtacctctggtagaattcggctgtgaatccatctggtcctggactttttttggttggtaaactgttagttattgcctcaatttgagatcctgttattggtctattcagagattcaaattcttcctggtttagttttgggaggatgtatgtgacaaggaatttatccatttcttctagattttctaatttatttgcatagaagtgtttatagtattctctgatggtagtttgtatttctatgggattggtggtattatcccctttgtcttttttattgcatctatttaattcttctctcttttcttctttattagtcttgctggccgtctatcaattttgttgatcttttcagaaaaccagctactggattcattgattttttgaagggttttttgtgtctctattccttcagttctgctccgatcttagtaatttcttgccttctgttagcttttgaatgtgtctgctcttgcttttctagttcttttaattgtgatgttagggtgtcaattttggatctttcctgctttctcttgtgggtatttagtgctgtaaatttccctctacacactgctttgaatgtgtcccagagattctggtatgttctgtctttgttctcgttggtttcaaagaacatctttatttctgcgttcttttcgttatgtacccagtagtcattcaggagcaggttgttcagtttccatgcagttgagtggttttgagtgagattcttaatcctgagttctagtttgattgcactggggtctgagggacagtatgttataatttctgttttttgcatttgctgaggagtgctttacttccaactatgtggtcaattttggaataactgtgatgtggtgctgaaaatagtgtatattctgttgatttggggtggagaattctgtagatgtccatcaagtccacttggtgcagagctgagttcaattcttggatttcctttttaactttctgtttcattgaactgtctaatgttgacagtggggtgttaaattctcccattagtaatgtgtgggagtctaaatatctttgtagatcactcaggacttgctttatgaatctgggtgctcctgtattgggtgcatatatatttagaatagttagctcttcttgttgaattgatccctttaccattaagtaatggccttctttgtctcttttgatctttgttggtttaaagtctgttttatccaagactaggattgcaacccctgcctttttttgttttccatttgcttggtagatcttcctccatccttttattttgagcctatgtgtgtctctgcacattagatcggtttcctgtatacaacacactgatgggtcttgactctattcaatttgccagtctgtgtcttttaattggagcatttagcccatttacatttaaggttaatgttgttaagtgtgaatttgattctgtcgttatgatgttagctggttattttgcttgttagttgatgcagtttctttctagcctcgatggtctttacaatttggcatgtgtttgcagtggctggtaccagttgttcctttccatgtttagtgcttccttcaggagctcttttagggcagacctggtggtgacaaaatctctcagcatttgcttgtgtgtaaaggattttatttctcattcacttatgaagcttagtttggctggatatgaaattctgggttgaaaattcttttctttaagaatgttgaatattggcccccactttcttctggcctgtagagtttctgccacgaggtcagctgttagtctaaagggcttccctttgtgggtagcccgacctttctctctggctgcccttaacatttttgccttcatttcaactttggtgaatctgacaattatgtgtcttggaattgctaatgtcgaggagtatctttgtggtgttctatgtatttcctgaatttgaatgttggcctgccttgctagattggggaagttctcctggataatatcctgcagagtgttttccaacctagttctactctccccattacttttaggtacaccaatcagacgtagatttggtcttttcacatagtcccttatttcttggaggctttgttcacttctttttattcttttttctctaaacttctcttcttgcttcatttcattcatttgatcttccaccactgataccgtttcttctagtagatcgattcagctactgaggcttatgcattcgtcacgtggttcttgtgccatggttttcagctccatgaggtcctttaaggacttctctgcattgattattctagttagccattcgtctaatttttttcaatgtttttaacttctttgccatgggtgcacacttcctcctttagctcagagtagtttgattgtctgaaaccttcttctctcaactcgtcacagtcattctccatcaagctttgttccattgctgttgagtagctgtgctcctttggaggaggagaggcactctgatttttagagtttccagtttttctgctgtttttccccaatctttgtagttttatctacttttggtctttgatgatggtgacttacagatcacctttggtgtggatgtcctttctgtttgttagttttccttctgacagtcaggaccctcagctgctggtctgttggagtttgctggaggtccactccaaaccctgtttgcctgggtataagcagcagaagctgcagaacagcagatattggtgaacagcaaatgttgctgtcttatagttcctctggaagttttgtctcagagtagtacctggctgtgtgaggtgtcagtcttcccttactttggggtgtctcccagttaggttacttgggggtcagggaccaacttgtggaggcagtctgcccgttctcagttctcaagctgcatgctgggagaacgactattctcttcaaagctgtcagacaggaatgtttaagtctgcagaggtttctgctgccttttgttcagctatgcattgccccgagaggtggagtctacagaggcaggcaagcctctttttgctgcagtcggctccacccagtttgagcttcctggccactttgtttacctactccagtttcggcaatggtgggcgcctctctcccagcctcactgctgccttgcagtttgatctcagactgctgtgctatcaatgagagaggctccatgggtgtaggaccctcctagccaggcgctggatataatgtcggtgtgccatttgttaagaccattggaaaagtgcagtattaggctgggagtgacccgattttccaggtgccatctttcacctctttctttgattcagaaagggaattctctgagcccttgcatttcccaggtgaggcgatgcctcacccagctttggctcacactcggtgcagtgcaccggctgtcctgcacccactgtctggcactacccagtgagatgaacctggtacctcagttggaaatgcagaaatcacccgtcttttgtgtcactcacactgggagttgtaaactagagctgttcatattctgtcatcttggctccaacccctttggtttttcgctataagcttcaaatatctctcaaaagtcccttcacagattctacaaaaaggtgtttccaacctgctgaatcaaaagaaagtttaactctgtgagataaatccacaaatcacaaagcagattcactgatagcttctttctaatttttatcttgaatttttttttctttttaccatagactacaatgggttcatgaatctccttttgcagattgttgcaaaacagcatttccaacatgttgagtcaaaagaaaggtttaaatcattgaaatgaatccacacatcacaaagcagtttcaaagatagcttctttgttgttttcatctgaagatatttgatttttcactaaaggctttaataggcccccaaatgtcactatgtagattataaaacataagtatgtgcaacctgctgaatcaaaagaaaggtttaactctgtgagatgaatccacacataacaaagcagttacacagatagtgtctttgtagtttttatctggggatattcagtttttcaccttaggcctctatgggctcccagatgtctttccaccaattctaccaaatgagtgtttccaagttactgaatcaaaagaaatttttaaccctgtcagattaatccccacatcaaaaggcaattttacacacagagtctttctagtttttatcttggaatatttggctattcaacagaggccaaaaaactgctacaagatatcccttcatagattctaccaaaagattgtctttaaaatgctgaaagaaaaacaaggttgaactctgtaagatgaatccacacatcacaaagcagtttcaccaatagcttccttcctgtttttatttggagatattttgtttttcactgtaggccttaaagggctcccaaatgtccgtttgcagattgtatcaaaagagtgtttccaacctcccgaatcaaaagatacatttaactcagtgagataaatccacacatcacaaagcagtttcacagacagattccttcaagtttttatcttgggataatgtgtttttcaccttaggtttctatgggatcccaaatgtctctcttcagtttccacaaaacgagtgtttccaagctgctaaatcaaaactaaggtttaactctgtgagatgtatccacatatcacatagagatttcactgatagcttcttcctagtatttgtatgaagatatccggtttttgaacataagcctctgtgggcttccatgtctcccttcccagattcttccaaacgtgtttcaaatctgctgtatcaaaagaaatgttttactctgtgagatgaatccaatatcaaaaagcagtttcactgataccttctttctagtttttaactgtgggtattctgtttttcactgctggcttctaagggcccacaaacgtccttttgcagaatctccaaagacagggtttccaacctactgaattggaaaggtttaaccctgtgaaatgaatccacacattactaagcagtttcactgatagcttctttctaatttttcctggggttattttattttttgctataggcctcaaagtgctcctaaatgtaccttcccagattctacctaaagagagtgttgggggaagtcagggaccccgaatggagggaccagctgaaggtatgcagaaaaacataaattgtgaagatttcatgaacatttattagttccccaaattaacacttttataatttcttatgcttgtctttactgcaatctctgaataaaaattgtgaagattttatggacatttatcactttcccagtaaatggtcttgtgatatcctatgcctgtcttttctttaatctcttaatcctgtcaccttcataaactgaggataaatgttgcctgaagaccgtgtgatgattgtgttaactgcacaaattgtttaaacaatatgaaatctgggcaccttgattaaagaacagaataacagcgatgttcagggaacaaaggagataaccattaggtctggctgcctgagagccgggtggaacagagccatatttctcttctttaaaaaaaaataggagaaatatcactgaattctttttcttagcaaggaagagccctgagtgagagaatgcatcccttggggtaggcttctgaaatggcagctctgggaacatctatcttttttggttgtagataagggatgaaataagccccagtctcctgtagtgctcccaggcttattaggatgaggaaattcccgcctaataaattttggccagtccgtttttctgtcctcaaaccctgtctcctgataagatgttatgaatgacaatgcttgcctgaaacttcattagcactttaaattttgccccagtcctgtgatcttgccctgcctccatttgccttggatattttattaccttgtgaagcatgtgatctctgtaacccacaccctattcgtacactccctccccttttcaaaatcactaataaaaactctctggttttatggctcagggggcatcatggaacctgcttacatgtggtgtctcccttggacaactagctttaaaaatttctctctttgtactctttccctttatttctcagactggccaaacttagggaaaatagaaaagaacccatgaagaattgcctggggtagtttcccccaatatctggcatgccaaaacggttttttctttttcccaagtgcatgtggcaacccgattccctttggcaggtgtgcagaaacttcattggtttggtccacaaaaacccacgttcgactccctgacaactcatgagtagtctgtatatggtccgggttaactatgggtcacagggagtataaaaattatacttatctcttccatattaaactccagttaaaacagaaaagggtttaagaccctgtggaaaatatggtcactctattcagggcagtggtaaactactgtccttggcctcctaaaaatagaaccttagttgtagatctactaaaacagggaagggtctgagtaaccatggaaaatgtggtcactctattcagggcggtggaaaaatactgtccttggtttcctgaaaaaggaaccgtatatgtaaaagtatgggatcatgctggtgcaacattctgggaactggtcccaacagagaattatgttcccatcactgtttgggggtgattgggtcttggtaagtggcgtcctcatacctgggaatcctccctgtcaatacatttaattaatgaagtgttacagcgaattctgaaaagatctaagagatttgttttcactttaattgctgtgatcatgtgcctaattacagtcactgcactggccaccactgctggaatggtgttatataaatctattcaaatggctcattttgctaatgattgggaagcctattccacccaaatgtggaattctcaacaaatcattgatcaaaaattggctaatcaaattaatgatttaagacagtgttatttggcttggagatggggtagtgagtctcgaacattgcatgcaaatgcagtgtgactggaatacttcggatttctatatcacaccataatcctgtaaagagaatgatcattcatgggaaatggtcaaaggacaccttctgggtgatgaagataatttatcattggacataactaaattaaaaacaactttttgaggcctctgaatctcacttatccattgtgcctggagctgaggcattagaccaggtagtagaaaatctttatggactaacccacgacttggattaagtctactgggggctccactgtagtaaattttggaatcatgtttctctgtttaattggcttgtcttaatatgatagaccagtcaaagaatcatgcatcaaaatcgagagaatgaacaaaccttcatcgccatggcacatttatatcatcagaaagggagatatgttgtgggaagtcagggaccctgaatggagggaccagctgaagccatggcagaagaacataaattgtgaagatttcatggacctttattagttccccaaattaatacttttataatttcttacacctgtctttactgccatctctgaacataaattgtgaagatttcatggacatttatcactatgaatgtcgcctcaggaccctgcaatgattgcatgaactgcacaaattgtttaaacaatatggaatctgggaaccttgaaaaaagaacaggacaacagtgatgatcagggaacaagggagataatcattaggtctggtttcctgagagttgggcagaacagagccatatttatcttctttcaaaagcaaataagagaaatatcactgaattctttttctccacaaagaacagccctgagaaagagaatgtattcctaagggtagaactctgaaatggccactctgggaacatctgtcttttatggttgtagagaagggaagaaataagccccagtctcctgtagccctcccaggcttattaggaggaggaaattcccacctaataaattttggtcagaccggttgtctgctctgaaacactgtctcctcataagttgttatcaatgacaatgtgtgcctgaaaattcattagcaattataattttgccccagtcctgtgatctcaccctgcctccagttgccttgtgatattttattactttgtgaagcatgtgatctctgtgacccataccctattaatacacaccttccccttttgaaaatcactaataaaaacttcctggttttattgctcatgcggcatgacagaacctgcctagatgtgatgtctcccctggacacccagctttaaaagtttctctctttgtactctttccctttatttctcagaccagccaacatgtagggaaagtagaaaagaactcacattaaaatatcaggggctgaatttcccctgatagagagattcaaacatgctgtatcaaaataaaaatataactctgtaagattaacacacatatcacaaagcagtttcaaagacagtttattctagtttttatctggggatattctttttttcaccatagacctctatgggttccgaaacctcccttcacagattctaccaaaagagtgtttcaaacctgctgaataaaagaaaaggtttagctctgtgagatgaatccacacatcacaaaacagtttgacagataatttctttgtagattttatctggggatattctgtttttcaccataggcctgtatgggttccccaaagtcccttcacagattctacctaagagtgtttcaaacctgttttatcaaaataaaaatttaattgtgtgagataaatccacacatcacaaagctgttttacagatagaattttctagtttttatctggggatagttggattttcaccataggcctctatggactcccaaagtttctttgcagattctacaaaaaggctgtacgcaacttgctgattcaatagatgggtttatctctgtgagatgaaccaacagatcatggggctgtttcacagatagcttctttctagctggtatctgtgaacattcggttttttatcataggcctcaaaaagcttccaaatttctctttacagattatatgataccagtggtttccaacatgttgtatcaaaagaaacgtttacctctgtgagatgaatccacacatcataaagaagttcacagatagctttttcctagtttttatcaggggataatggtttttttttgtttttttgttttttttgttgttgttatttttttgtttttttttaacataggcctcaaagggcttcaaaatgccccatgaagattctacaaaactagtgtttccaacctactgaatcaaaggaatggtttatctctgtagatgaatccacactcaaaaaagcagtttcacaaatagcttctttctggtttgtatctgggggtattcagtttttcactacattcctgaaagggttcccaaatgtaccttcgcagattccataaaaagtgtctttgtaacctggtgaatcaaaagaaaggtttaagtttgtgatttgaattgagacatcacagagcagttgcacagatagcttctttctagtttttgtctggggatattttgtttttaccatacgagtctaagggctctgatacagccctttaaagattctaccataagagtttttcccatttactgaatcaaaagaaatgtttaactctgtgaaacaaatccacacatcacaaggcagcttcacaggtagcttctttctagtttttatatagaaatattaggtttttcaccttaaaccctaaagggctttgaaatgtcccttcgcagaacttaccaaaagacggtttcacacctgctgaatcaaaacaaatgtttaattctgcgaggtgaatccacacatcacacagcagtttcacagacaccctctttccatattatatctggggatattctgtttttcaccatagaactgtatggtctcccaaatgtcccttcgcgtattctatctgaagagtgtttcaaatttgctggatcaaaagaaaggtttaactctcagtggtgaatccagatatcagaaaggagtttcaccagtagctttcttctgatttttaatgggggatattgtttttttcaccataggcctcaatgggcttccaaatgtcccttctcaggttctaaaaaataagtgtttccaacccgctgaatcaaaggtaaagcttatctctgtgagttgaatccacacatcacaaagtagtttcacagattgctactttgtagtttttgtctgtgaatattttgtttttcaccgtagacctcaaaaagcttccaaagacaaaaacgcccttcacagattctgccaaaaaagtttttccaacctgctgaaacaaaagaaaggtttaactctgagagatgaatccacacatcgcagagcagtttcacagatagcctctttctaatttttatctgggaatattctgtttttcaccataggtctcaatgggctcccacatatccctttcctgattttaccaatagagtgtttccaaactgctgaatcaacagagaactttaactctgtgagaagaatccacacatcacaaagtagcttcactaaaagcttctctgtagcttttatctttgaatattccatttttcaaagtgtgctacaatgggctcacaaatgtcccttaacagatctagcaaaagagtgtttgcaacctgctgaatcaaaagaaaggtttaacctttgagctgaatccacacttaacaaagcagtttcacagatagcttcttgatagtttttatgtggggatattctgttttacaccataggcctctatgggcttataagtgttccttctcagattctttctaaagactgtttccatcctgctgtatcagaagaaagtttaactctgtgcaatgaatctacacatcacagagcacttcacaaatagattctttctagtttttatctggggatattttgtttttcacaataggcctcaagggacgccaaaataccccctcacagtttccaaaaactgagtgtttcaaacctgtggaatcaaaggaaaagtttaaagtctttgaggtgaatccacacatcacaaagcattttcaaggatagcttctttctagtttttatctggggatattcgatttttcaccataggctttaatgggctcccaaatgtcagtatacaaattataaggcaaaagtatttgtaacctgctgagtcaaaataaaggtttaaatctgtgagatgaatccacacattacaaagcagttactcggatagcttttttctagcttttatctggagatattcagtttttcaccttaggcctctatgggctcccaaatgtgtttccacaaattctaccaaaagactgtttccaagctactgaatcaaaagaaatgtttaactctgtgagatgaacccacacataaaagcagttttagagacagagtctttctaggctttatcttgggatatttggttattcaccagagtccaaaaaaactgttattctaccaaaagaatacttccaacctgctgaatcaaaagataggtttaactcagtgagatgaatccacacatcacagagcagtacaacagatagattccttcaagtttttatctggggatattgggtttttcaccttaggtctctatgggcttccaaatgtctctctgcaggttctataagacgtgtttccaacttgctgaatcataagaaatatttaactctgtgagatgaatcctcaatcacatagcagtttcactgataccttcttcctagtatttatatgaagatatttggtttttaaacttaggcctctatgggctgccatatttccctttgcagattcttccaaaaaagtgtttcaaatctgctgtatcaaaagaaaggtttaactctgtgagatgaatccacatatcacaaaatagtttcactgatactttctctctggtttttatgtgtggatattctgtttttcaccatatgcctctgagggctcacaaacatcctttagcagaatctccaaatagagggtttccaaactactgaatgaaaagaaaggattaactctttgaggtgaatctcaaattacaaagcagtttcactgataggttctttctagttcttttctgggaatattttatttttcaccttagtcctcaaagtgctcccaaatttaccttcacagattttacctaaagagagtgtttcaggaagtcagggaccccaatcagagggacgagctgaagccatggcagaagaacataaattgtgaagatttcatggacatttattagttccccaaattaatacatttatttcttacacctgtctttactgcaatctgtgaatataaattgtgaagatttcatggatatttatcacttcccctatcaatacccttgtgatttcctttgcatgtctttaatctcttaatcccatcagcttcttaagctgaggatgaatgtcatctcgggaccgcgtgatgattgcattaactgcaaaaattgtttaaacaatatgaaatctgggcaccttgaagaaagaacaggatagcagtgatgttcagggaacaagggagacaaacattaggtctggctgcctgagagccgggtggaacggagccgtatttctcttctttgaaaagcgtataggagaaatatggctgaattctttttctcagcaaggaacagccctgagaaagagaatgcattcctagggttatgcatctgaaatggcttccctgggaacatctgtcttttactgttgtagataagggatgaaataagccccagtttcccatagtgctcccaggcttattagaatgaggaaattcccacctaatatattttggtcagaccggttgtctgttctcaaatcctgtctcatgataagatgttatcaatgacaaagcatgcccgaaacttcattagcaattttaatttcgccctggtcctttgatctcaccctgcctccctttgccctttgatattttattacattgtgaagcatgtgatctctgtgacccgcatcctgctcgtacaccccctctccttttgaaaatcactaatgctggttttatggctcagggggcatcacggaacctgccaacatgtgatgtcacccctggacacccagctttaaaaatttttgtctttgtaattttctgttaatttcttagaccagtcaacacttaggtaaaatagaataggactcatgttgaaatatcgggggctgaatttcccctaacagagagtttcaaacctattgtatcaaaataaaaatttatctctgtaagatgaatgcacacatcacaaagcagtttcaaagacagcttttatctagtttttaactagggatattcggtttttaaccataggactcaaaattctcccaaatgttccctcatacattctaaccaaagagtgtttccaacttgctgagtgaaaagaaagattcaacactctgagatgaagcgacatatcaaaaagcagtttaacagatagtctcttcctagtttttatctgcagatatttggtttctcaccaaaggactcaaaggactttcaaaagtcccttcgcagactctgcaaaagtactgtttgcaacatgctgaatgtaaacaaaggtttacctctctgggatgaatccacacatcaaaaagaagtttcacagatagaccctttctagttttgatcttgggatatttggtttgtcaccataaactacagtgggctcaaaaaagtcccttcacagattctagaaaaaaagtgtttctaacctagtgaatcaaaaacaagtttaaccctttgagatgaatccacatatcactaagctgtttcacagagagcttatttttagtttttatctgggggtattctgtatttcaccataggcctttggggttcccaaacctccctttacagattctaccaaaagagtgtttcaaacctgcttaataaaagaaaagttttaactctgtgagttgaatccacatgtcacaaaaaagtttgacagatagcttctttctagattttatctggggatattctgtttttcaccataggcctctatgggttcccaaatgtcccttcacagattctacctaaagagtgtttcaaacctgctttagcaaaagaaaaatttaactctgtgagacaaatccacacatcacaaagctgatttacagatagctttttcctagtttttatctgaggatattttatttttcaccataggcccctgtgggctcccaaatgtccctttgcagatactaacaaatagtgtttccaagctgttaaatgaaaacaaatgtttcccactgtgagatgaatccacacgtcagaaagcagtttcacagatagcttttttctagtgtttatctgggaatatttggttttccaccacaggcctctgtggactcccaaaatatcttcacagattccacaaaaagagtgtacaaaacttgctgattcaatagagtggttaatctctgtgagatgaatccacagattatagggctgtttcacagaaagcttttttctagtttttatctgtgaacatttgtctcaaaaagcttcaaaatttctctttgcagtttctatgaaaacagtgtttccaacatgctgtatcaaaagaaacgttgacctctatgagatgaatccactcatcaaaaagaagttcacagatagcttcttcctagtttttatctggggatattgagtgctttttttttaaacataggcctatacaaggctatagtaaccaaacagcatggtactggttccaaaacagagatatagaccaatacaacagaacagagacctcagagataataccactcacacacaaccatctgatctttcaaaaaactgacaaaaacaagaaatggggaaaggattccctatttaataaatggtgctgggaaaactggctgaccatagatagaaagctgaaactggatcccttccttacactttttaaaaaattaattcaagatggattaaagacttaattgttagacctaaaaccaaaaaatccctagaagaaaacctaggcaatacaattcacgacataagcatgggcaaggacttcatgtctaaaacaccaaaccaatggcaacaaaagccaaaattgacaaatgggacctaattaaactaaagagcttctacagagcaaaagaaactaccatcagagtgaacaggcaacctacagaatgggagaaaatttttgcaatctactcatctgacaaagggctaatatccagaatctacaaagaactcaaacaaatttacaagaaaaaaacaaccccaccaaaaagtgggcaaaggatatgagcagacacttctcaaaagaagacttttatgcagccaaaagacacatgaaaaaatgttcatcatcacgggccatcagagaaatgcaaatcaaaaccacagtgagataccatctcacatcagttagaatggcgatcattaaaaaatcaggaaacaacaggtgctggagaggatgtggagaaataggaacacttttacactgttagtgggactctaaattagttcaaccattgtggaagacatcatggaaattcctcaatgatctagaatgaaaaataccatttgacccagccatcccattcctgggtatatacccaaaggattataaatcatgctgctataaagacacacacacacgtatgcttactgtggcactattcacaatagcaaggacttggactcaacccaaatatccatcaatgatagactggattaagacatatacaccattgaacagtatgcagccataaaaaatgatgagttcgtgtcctttgtaaagacatggatgaagctggaaaccatcattctcagcaaactatcacaaggataaaaaagcaaacaccgcattttttcactcataggtgggaattgagcaataagaacacatgcacacaggaaggagaacatcacacaccggggcctgttgtgaggttagggtatggaggagggttagcattaggagatatacctaatgctaaatgactatttaatgggtgcagcacacctacatggcacacgtatacatatgtgacaaaacgaaacactgtacacacgtaccccagaaattaaagtataataataaaaaaagagagattcaaacttgctgtatcaaaataaaaatttaacaccgcaagatgaatacagatatcacaaagcagtttctctttcttaaattttattattattatactttaagttttagggtacatgtgcacattgtgcaggttagttacatatgtatacatgtgccatgctggtatgctgcacccattaactcgtcatttagcattaggtatatctcctaatgctatccctcccccctccccccaccccacaacagtccccagagtgtgatgttccccttcctgtgtccaggtgttctcattgttcaattcccacctatgagtgagaacatgtggtgtttggattttgtccttgtgatagtttactgagaatgatgatttccaatttcatcgatgtccctacaaaggacatgaactcatcattttttatggctgcatagtactccatggtgtatatgtgccacattttcttaatccagtctatccttgttggacatttgggttggttccaagtctttgctattgtgaatagtgctgcattaaacatacgtgtgcatgtgtctttatagcagcatgatttatagtcctttgggtatatacccagtaatgggatggctgggtcaaatggtatttctagttctagatccctgaggaattgccacactgacttccacaatggttgaacaagtttacagtcccaccaatctccagcacctgttgttccctgactttttaatgattgccattctaacaggtgtcagatggcatctcatggtggttttgatttgcatttctctgatggccagtgatggtgagcattttttcatgtgctttttggctgcataaatgtcttctcttgagaagtctctcttcatatacttcgtccactttttgatggggttgtttatttttttcttgtaaatttgtttgggtacattgtagattctggatattagccctttgtcagatgagtagcttgcaaaaattttctcccattttgtaggttgcctgttgactctgatggtagtttcttttgctgtgcagaagctctttagtttaattagatcccatttgtcaattttggctttggttgccatagcttttggtgttttagacatgaagtccttgtccatgcctatgtcctgaatggtaatgcctaggttttcttcaagggtttttatggttttagttctaacttttaagcctttactccatcttgaattaatttttgtataaggtgtaaggaagggatccagtttcagctttctacatgtggctagccagttttcccagaaccatttactaaatagggaatcctttccccatttcttgtttttctcaggtttgtcaaagatcagatagttgtagatatgcggcgttatttctgagggctctgttctgttccattgatctatatctctgtttttgtgccagtaccatgctgttttggttactgtagccttgtagtatagtttgaagtcagatagtgtgactatttccttcaattcttctctgattttagttatttcttgccttctgctagcttttgaatgtgtttgctcttgcttttctagttcttttaattgtgatgttagggtgtcaattttggatctttcctgctttctcttgtgggcttttagtgctataaatttccctctacacactgctttgaatgtgtcccagagattctggtgtgttgtgtctttgttctcgttggtttcaaagaacatctttatttctgccttcatttcgttatgtacccagtagtcattcaggagcaggttgttccgtttccttgtagttgagtggttttgagtgaattccttaatcctgaattctagtttgattgcactgtggtctgagagagagtttgttataatttctgttctttgacatttgctgaggagagctttacttccaactatgtggtcaattttggaataggtgtggtgtggtgctgataaaaatgtatattctgttgatttggggtggagagttttgtagatttctattaggtctgcttggtgcagagctgagttcaattcctgggtatccttgttgactttctgtctcgttgatctgtctaatgttcacagtggggtgttaaagtctcccattattattgtgtgggagtctaagtctctttgtaggtcactcaggacttgctttatgaatctgggtgctcctgtattggcttcatatatatttagaatagttagctcttctttttgaattgatccctttaccattatgtaatggccttctttgtctcttttgatctttgttggtttaaagtctgttttatccaagactaggattgcaacctctgcctttttttgttttctatttgcttggtagatcttcctccatccttttattttgagcctatgtgtgtctctgcacatgagattggtttcctgaatacagcacactgatggatcctgactctttatccaatttgccagtctgtgtcttttaattggagcatttagtccatttacatttaaagttaatattgttatgtgtgaatttgatcctgtcattatgatgttagctggttattttgctcgttaattgatgcagtttctttctagctttgatggtctttacaatttggcatgattttgcagtggttggtaccagttgttcctttccacgtttaatgtttccttcaggagctcttttagggcaggcctcgtggtgacaaaatctctcagcattagcttgtctgtaaagtattttatttctccttcacttatgaatcttaatttggctggatatgaaattctgggttgaaaattcttttctttaagaatgttgaatattggcccccactctcttctggcttgtagagttgctgctgagagatccgctgttagtctgatgggcttccctttgagggtaacccgacctttctctctggctgcccttaacattttttccttcatttcaactttggtgaatctgacaattatgtgtcttggagttgctcttcccgaggagtatctttttggcgttctctgtatttcctgaatctgaatgttggcctgccttgctagattggggaagttgtcctggataatgtcctgcagagtgttttccaacttggttccattctccccatcactttcaggtacaccaatctgacgtagatttggtcatttcacatagtcccatatttcttggaggctttgttcatttctttttactctaaacttcccttcatgcttcatttcattcatttcatcttccatcactgataacctttcttccagttgatcccatcagctcctgaggcttcggcattcttcacatagttctcaagtctttgctttcagctccatcagctcctttaagcacttctctgtattggttattctagttatacattcgtctaaatttttttcaaagtttttaacttttttgcctttggtttgaacatcctcctgtagctcagattagtttgatcatctgaagccttcttctctcaactcgtctaagtaattctccatccagctttgttgcgttgctcgtgaggagctgcgttcctttggaggaggagatgccctctgctttttagagtttccagtttttctgctctgttttttccccatctttgtggttttatgtacttttggtctttgaggatggtgatgtacagatagtttttggtgtggatatcctttctgtttgttagttttctttctaacagacaggaccctcagctgcaggtctgttggagtttgctagaggtccactccagaccctgtttgcctgggtatcaagagcgttggctgcagagcagctgatttttgtgcaccacaaatattgctgtctgatcgttcctctggaagttttgtctcagaggagtacctggccgtgtgatgtgtcagtctgcccttactggggggtgcctcccagttaggctgctcaggggttcggggtcagggacccacttgaggaggcactctgcctgttttcagatctccagcttcatgctgggagaaacactgctgtcttcaaatctgtcagacaggaacatttaagtctggagaggttactgttctttatttttgtctgtgccctgcccccagaggtggagcctacagaggcaggcaggcctctttgggctgtggtgggctccatcaagttggagcttcccggctgctttgtttacctaaggaagcctgggcaatggcgggtgcccctcccccagccttgctgccaccttgtagtttgatctcagactgttgtgctagcaatcagtgagacttcgtgggcataggaccctccaagaaggtgtgggatgttttctcctggtgtgccgttttttaagcccattggaaaagtgcagtattagggtgggagtgacccgattttccaggtgctgtctgtcacccctttctttgactaggaaagggtactccctgaccccttgaatttcctgagtgaggcaatgcctcgccctgcttcgccttgcacatgctgtgctgcaccaactgtcctgtgcccactgtctcgcactccctagtgagatgaacccggtatcccagatggaaatgcagaaatcacctctcttctgtgtcactcacactgggagctgtagactggggctgttcctatttgtccatcttggctgcccacaaaccagtttcaaagacagctttttttctagtttttttctggggacatttgttttttcaccataagcctcaaaatctcccaaatattcctcatacattctaaccaaaaagtgtttccaacttattgagtaaaaagaatggttcatcattgtatctcatggagttaaacctttcttttgattgaacaatttggaaacactttttttttgcagactctgcaaatggataattgggagtgtattgaggcctatggtggaaaaggaaatgtcttcagataaaaactagaaagaagctttctgagatactgctttgtgatgtgtgtattcatctcacagagataaatcttcgttttgattgagtagtttggaaacactgtttttctaggatctgagaaaggatacttggaaagaaatgaggcctttagtgaaaaaggaaatatcttgagacaaaaactagaaagaagctttctgattaactgctttgtgatgtgtacgtgcatctcacaaagttaaacctttcttttgatagagtatcttggatacactgtttttgtagaatctacataggaatatttgggagcacattgaatccccttttgaaaaaggaaatatcttcacataaaaattagacagaagcttttctgagaaaatgctttgtgatgtctgcttttatgtcacagaatttaatcattctttagattaagcagttttgaaacacggtttttttagaatctgtgaaaggatatttgggagcacatggggcccatggtgaaaaagtaatattctcagataaaaagcagaaagatgctttctgagaaactgtttagtaatgtctgcattcatcttatagagttaaacttttcttttgattgagcaggttggaaactatgtttttggagaatctgccaatggatatatgagcgcacattgagttttatggtgaaaaaggaaatatcttaagataaaaattagaaagaacctttctgagacactgctttgtgttgtgttcattcatctcacacagttaaaactttattttgattaagcagtttggaaaaactgtatttgtagaatgtgcaaagggatatttgggaattcattgaggcctaaggtgaaaaaggaaatatcctcagaaaaaaactagaaagattaaggagaaactgctttgtgttgtgtgcattcatctcatagagttaaacctttcttttgattgagcagtttggaaatactgtttttgtagaatcagggaaggaatatatgggagcacattgaggcctacagtgaataaggaaatattctcaggcaaaaactagaaagaagatttctgattaactgttttgtgatgtgtccattcatgtcatacagttaaacctatcttttgattgaacatcttggaaacactatttttgtagattctgtgaagggatatttgggagcactttgaggtctatggtgaaaaaggaattgccttcacataaaaactagaaagaagctttatgagaaacggctttgtgatgtctgcattcatctcacagagttaaatatttcttttgattgagcagtttggaaacactgtttttgtggaatctgtgaagggatattttgtagcatgttggtgcctattcagagaaaagaagtacctcagataaaaatcagaaagatgctttctgaggaactgctttgcaatgtgtacgttcatctcacagagtcatacctttcttttatttgagaagtttggaaacactatttttgtagactctgtgaagggatatttgggagcgctttgaggcctatggtgaaaaaggtgatatcttcacattaaaacaagaaagacacattctgagaacgtgctttgtgatgtgtgcattcctcacacagatataaagctttcttttgattgagcagtttggaaacactgttttggtagaatcttagaaaggatacttgtgaatgcaatgaagtctatggtgaaaaaataaatatcctgagataaaaactagaaagaatctttcttattaactgctttgtgattagtccattcatcacacagagataaacctttcttttgattgtgcatcatagaaacactgttttgtagaatctgtgaagggatatttgggagcacctgaggcctgtggtgaaaaaggaaatatctccacataaaaactagtaagaagctttctgagaaactgctttgtgatatatgtactcatctcacagagttaaaactttccttttagtgagcagtttggaagcactgtttttgtagaatctgtcaagggatatatgggaatgcattgattcctatggcgaaaaatcaaatatcttcacataaaaactaggaagaaactttcagagaaactgctttgtaatgtcagttccgtctcacagaggttaagcattcttttgattgagcaattttcaaagacagttttagtggaatctgtgaaaagatacttgggagcgcattgaagctcatggtgaaaaaggataaatcctcagaaaaaactagaaagaatctttctgattaactgatttgtgatgagtccattcatcacacagagttaaaccattcttttgattgcacagcttggaaacactgttttgttgaatctttgaagggatatttgggagcacaagaggccaatagtgaaaaagataatatcttcaaataaaaacagaaagatgctttctgagaaactgctttgtgacatgggcattcatctcatagagttaaagatttcttttgattgagcagtttggaaacactgtttttgcaggatatgccagtggatatatgggagcactttgaggcctatggtgaaaaagaaaatatattttgaagaaaactagaaagaagttttctgagaatctgtgtggtgatgtgtgcattcatctcacagagttaaaactttcttttgattgagtggtttggtaacaacatttttgtagaatctgtgaagggatatttgggaacaccttaagaactatggtagaaaatgaaatatcatcagataaaatctagaaagaagcttttttagacactgctttgtgatgtgtgcattaatctcagagttaatcctttcttctccttgagaagtttggaaagactgttttgtagaatctgtgagggatatttgggagcgccttgaggactatggtgaaaaaggaaatatcttcagataaatctagaaagaagctttgtaggaaactgctttgtgatgggtgcattcatctcatagagttaaacctttcttctgatcaagcagtttggaaaaactgtttttgtagaatctgcaaaggaatatttaggaaagcattgaggcctatggtgaaaagggaaatatcttcatatataccagaaagaacgtttctgagaaactgctttgtgatgtgtgcatacatctcacagagttaaactactcttttgactgagcagtttggaaacactgtttttggagaatctgtgaagagatatttgggagtgccttaaggactatggtggaaaagtaaatatcatcagataaaaactagaaagaagttttttgagacactgctttgtgatgtgtgcatttatctcacagagttaatcctttcttttcattgagcagtttggaaagattgtttttgtagaatctgtgagggatagtcgggagcacattgaggcctatggtgaaaaaggaaatatcttcagataaatctagaaagaagctttgtgagaaactgctttgtgatgggtgacttcatctcacagagttaaacctttcttctgattgagcagtttggaaaaaatgtttttgtagattctgcaaagggatatttgggaacacattgaggcctgtggtgaaaagggaaatttcttcaggtaaataccaggaagaagctttctcagaaactgctctgtgatgtgtgcattcatctcacagagttaaacatttcttctgattgagcaatttggaaacactgtttttatagaatctctgaaaggatattttggaatgcattgaagcctatggtgaaaaagaaaatatcttcagataaaactaggaagatttctgagaaacacctttggaacgtgtgctttcatctctcagagttaatcttttcttttgattgagcagtttggaatgtctatttttctagaatccatgaagggattattgggagcgcattggggccaactgtgaaaaaggaaatatctttagataaaaactagaaagcagctttctgaaaaacttctttgtgaaatctgcatttggctcacaccattttgcattcttttgattaagcagtttgcaaacagtttttgtagaatctttgaaaggatatttgggagtgcattgaggcctatggtgaaaactgaaatatcttcatataaaaaccagaaagatgcattatgagaaactgctttgtgatgtgtccattcatctcacagaaataaacttttattttgattgagcagtttggaaacactgtttttttcttcaatctgccaagtgatacatgagagcacattgaggcctatggtgaaagaggaaatatcttcagagaaaagctagaaggaagctttctgaaatactgttttgtgatgtctgcattcatctcagagagccaaacacttcttttgatttactcatttggaaacactgattttttagaatctacgaagggatatttgggagcacattgaggactatggtgaaaaagcaaatatcttcagagaaaaactagaagcaagctttctgaaacactgctttgtggtgtctgtattcatgtcagagacttaaacttttcttttgattgacctgtttggaaccactgatttttcagaatctgtgaagggatatttgggagctcattgaggactatggtgaaaaagaaaatatcttctgacaagaactagaaagaagctctctgagaaactgcatagtgatgtgtgcattcatctcacaaagttaaatgtttctttgatttagctgtttggtaacaacacttttgtagaatctgtgaagggatatttgggagtgcattgaggcctatggtgagaaggaaatatcttcagataaatactaatagaagctttctgagaaagtgctttgtgatgtgtacattcatctcacagagttaaagttttgttttgatagacctgtttgtaaacactgatggtgtagaatctgtgaagggatatttgggagagcattgaaggctatggtgaaaaaggaaatatcttcagaaaaaaactagaaagtagctttctgagaaactgatttgtgatgtgcccattcatctcacagagttaaaactttcttttgattgagcagcttggaaacactgtttttgtagaatctgcgaagggatatttaggagcacattgaggcctatgatggaaagggaatcatcttcgcttaaaaattacaaagaatctttctgagaaaattctttgtgttgtgtgcattcgtctctcagagctaaacatttctgttcattgagagttttggagatactgttttcgtggaatctgagattgcatatttcggagcacattgtggcctatagtgaagaaggaaatatcttcccataaaaaccagaaagaagctttctcagaaactgctttgtgatgtgtacattcatctcacagagttaaagttttcttttgattgaccagtttggaaacgctgttattgcggaatctgcaaaggcatatttgggagcgcctagaggcctatgttggaaaatgaaatatcttcagataaaaactagaaagaagctttcagagacactgctttctgacgtatgcattcatctcacagagcacaacctttcttttgattgatcagtttggtaacaatgtttttgtagaaatcatgaagggatatttaggtgtgcattgcatcctatgctgaaaaaggaaatatcttcagataaatactagaaagaagttttctgagaaactgctttctgatgtttgcattcacctcacaaagttaaaactttcttttgattgggcagtttggaaacactgtttttgtagaatctgtgaagggatattttggaatgcattgaagtatgtggtgaaatagggaatatcctcaggtaaaaactagagaggtttctgagaaacaactttgtgatgtgtgctttcatctcacagagttaatcatttcttttgactgagcagttaggaaactgtgtttttctagaatctgtgaagggatatttgggatcacatttaggcccatggtgaacaattaaatatctttagataaaatctagaaagaagctttctgagacactgctttgtgatgtgtgtattcatctctcagaggtaaacctttcggctgattgagcagattggaaagactgtttttgtgaaaactgcgatgggatatttgggagcgcattgaggcctatggtgaaaaaggaaatatctgcagatgaaaactagacagaagctttctgagaaactgctttgtgacgtgtgcattcatctcacacaattaaaattttctttgactgatcagtttggaaacactgattttgtggaatctgcaaagtgatatttggaagtgcattgatgcctatggtgaaaaagaaaatatcttcaggtaaaaactagaaagaagctttctgagacactgttttgtgatgtgtgcattcatcttacagagataaagctttctgttgattgagcagtttggaaacactgtttctctagaatttgcagaagggtacttgggaatgcaatgagtctgctggtgaaaaaggaaatctcctcagacaaaaactagaaagaagctttctgattaactgctttctgatgtgttcactcatctcacagagttaaacttttcatttgattgagcatcttggaaacattgtttttgtagaatctgcaaagggatatttgtgagcacattaaggcctttggtgaaaaaggaaatatcttcagataaaaaccagtaggaagctttcagagaaactgctttgtgttgtctgcattcatctcacactgtttaagcattattttgattaatctgtttggaaacacagcttttgtagaatctgtgaaaggatatttgggaatacatttgggcctgttgtgaaacagaaatatcctcagataaaaaccagaaagatgttttctgagaaactgctttgtgatgtgtgcattcacctcacagtgttaaacctttctttagattgagcagtttcaaaacactgtttttgtagaatctgttaagggatataagggaatgcattgaagcctaaggtggaaaaggaaatatcttcacataaacactagaaaaaagctttctgatgaactgctttgtgatgtctgcattcgactcacagagtttaagcattcttttgattaagcagtttggaaacacaatttttgtagagtctgtgaaagcatacttggtagccgtttggggtctatggtgagaaaggatatatcctgagataaaatccagaaagactctttctgaagaactgctttgtgatgtgtgctttcttctcacagggttacacctttcttttgattgagaagtttggaaacactgtttctgtagattctgtgaagggatattttggagcacactgaggtctatggtgaaaaaggaaataacttcagataaagatcagaaagaagctttcagagaaactgctttgtgatgtgtgcattcatctcacagagttaagccattcttttgattgagcagtttggaaacactgtttttgtagaatctgcaaagggatatttgggagcacattgaggcctatggtgaaaaataaaatatcttctgttgaaaactagaaagaatctttctgagaaactgctttgtaatgtgtgcactcttctcgcatagttaaacctttcttctaattgagtagtttggaaacactgtttttctaaaatcattgaagggatatttgggaacgcattgaggcctatggtgaacaatgtgatatcctcagataaatactggaaagatttctgagaaacagatctgtgatgtgagcttttatcccacagagttaatcctttcttttgattgcaaagtttggaaactgtgtttttctagaatctgtgaagggatatttgggagcacattgaggcttattgttaaaaaggaaatatctttagctaaaaactagaaagaagctttctggaaaactgctttgtgaggtgtgtattcatctaacagagttaaacgtttcctttgattaagaagtttggaaacactgtttttatggaatctgcaaggggatatttggaagtgcattgagacctaaggcaaaaaaggaaataacttcagaagaaaactagacagcagctgtctgagaaactgctttgtgatgtgtgcattcatctcagagagttaatttttcttttgattaatcagtttggaaacactattttgtagaatttgtgaagggatatttgagagtccattgaggcgtatggtgaaaaaggaaatatcttcagataaaaacaagaaagaagctttctgagacagttttgtgatgtgtgcattcgtctcacagagataatgctttcttttgattgagcagtttggaaacaccatttttgtagaatctgtgaatgggtaatttggagtgcaatgaggcctactgtaaaaaggaagtatcctcagacaaaaactagaaagaagttttctgattaacttcgttctgatgtgtaaattcatctcacagagttaaacttttctgttgattgagcatcttggaaacactgcttttgtagaatatatgaagggatatttgtgagtacattgaggccttttgcaaaaatgaaatatcttcacataaaaactagaaagaaactttctgagaaactgcttagttttgtctgcatttgtcttacagagtttaagcattcttttggttaagcagtttggaaacacagtttttgtagaatctgtgaaaggatatttgggtgcacaatagggcctatggtgaaaaagacatattctcagataaaaaccagaaagatggttctgagaaactgctttgtgacgtgtgcattcatctcagagagttgaatgtttcttttgattgagcagtttggaaatgctggttttgtagaatgtgtgaagggatattttggagcacattttggcctatggtgaaaaagaaagtatcttcagataaaaaacagaaagaagctttcaaagaaactgctttgtgatgtgtgcattaatcttacagaattaaactgttcttttgattgagaagtttggagacatgttttttgtagaatctgcgaagggatacttgggagcacaatgaggccaatggtgaaaaaggaaatatcatctgatgaaaactagaaagattctttctgagaaacagctttgtgatgtgtgcattcatctcacaaagttaaacctttcttttgattgagcagtttgataacaatgtttttgtagaatctgcgaagggatattaggggtgcatagaggcccatggttaaaaagaaaatattttctgatgaaaactagaaagaaactttctgagaaactgctttgtgatgtgtgcattcacctcacagagttaaagctttattttgattgatcagtttggaaacaatgattttgtagaatctgtgaaggcatattttggagcacatcgaggcttatggtgaaaaagaaaatatcttcagatgaaaaatagaaagaagctttatgagaaactgctttgtgatgtgtgcattcgtatcacagagataatgctttcttttcatggatccgtttggaaacactgtttttctagaatctgcaaaagggtacctgggaacacaatgaggcctatggtgaaaaaggaaataccttcagacaaaaactagaaagaagctttctgaaaaactgctttgtgaagtgtgcattcgtctcttagagttaaagttgtcttttgattgataagtttggagacacggttttggtagagtctgtgaagggatatttgggagcaccttgaggcctatgttggaaaaggaattatcttcaaatagaaactagaaagaaggtttttgagacactgtgatgtgtgctttcatctcacagtgttaaacctttcttttgattgagcactttgggaagactgtttttggaggatctgcagaaggatatttgggcgtgcattgagggctatatggtgaaaatggaaatatctacagataaatctagaaaaaagcattgtgagaaactgtttgtgatatgtgtattcatctcacagagataaagctttcctttgattgagcagtttggaaacacggtttttgttgaatctgcaatgggatgtttgggagctccttgaggcctatggcagtaaaggaaatatcttcagataaaaactagaagaaagctttttgagacactgctttgtgatttgtgcactcgtctcacataattaaacctttcttttcattcagcagtttaggaacactgtatttttagaatcagcaaatagatatttgggagtgcattgaggcccaaatacactatggcaaaaaaaaagtgcattgagcactttgggaagactgtttttacagaatctgcaaaaggatattcgggagtgctttgaggcctatatggtgaaaagggaaatatcttcagataaatctagaaaaaaacattgtgagaaactgctttgtgatatgtgtattcatctcacagagataaacctttcctttgattgagcagtgtggaaacatggtttttgttgaatctgcgacgggatgtttgggagctccttgcggcctatggtggaaaaggaaacatcttcagataaaaattagaaggaagctttttaagacactgctttgtgatgtgtgcattcgactcacataattaaacctttcttttcattcagcagtttagaaacactgtatttttagaatctgcaaagagatatttgggagtgcattgaggcataaatccctatggcaaaaaagaaaatatctccagataaaaattagaaagtagtttttgagaatctgctttgtgatgtgtgcattcctctcacagagttaaacctttcttttgattcagctgtttggaaacactcttcttgtaggatctgtgaaaggatatttcagagcgcattgacacttatggtgaaaaataaaagttcttcagataaaaactagaaggaagctttctgagaaactgctttgtgatgtgtgcattcatctcacagagttaaagctttctcttgattcaacagtttggaaaactgtttttgtccattcagcgaatggacatcagacagctctttgactccaatggtgaataagtgaatatcccaggataaaaacaggaaggtagccatctgagaaactgctttgtgaagtgtgcactcttctcacagagttaaaccattcttatcattcagcagtttggaaacactgtttttgtattatgtgcaaagggatatctgggaatgcattgaggcctatggtgaaaaagaaaatatcttcagatgaaagctagaaagtagctttataagaaactactttgggatgtgtgcattcatcttacagcattaaacttttcttttgattcagctgcttggaaacactgtttttgtccattcaacaaaaggatatttgggagatcattgaggtgaatggtggaaaagtgaatatcctagtatagaaactagaaagaagctaccttaggaactgctttttgatgtgtgcactcgtctcccagagttaaacctttcttttcattcagcagtttggcaacactgtttttgtgctttctgagaatggacatctagggactcaatgaagccttggcaaagcagtgaatgtgcaaggataaaaactagaaggctggtatctgagaaaccactttgtgatgtgtgcattcattttgcagtttgaaaccattcttttcattcagaagattcaaaacactgttttccttgaatatgtaaagggatatttaggagtgtttagacgccaatagtgataaagaaaataccttcagagaaaaactaaaaagaagttttctgagaaactgctttgtgatgtgtgtattcacctcagagagttcaacatttcttttgattcagcagtttgcaaacactgtttatgtccattctaggaatggacattttggagatcattgaggccaatggtgagaaagaaaatatcccaggataacagctagaagaaagctatctgagaaagcactttgtgatttttgcattcatctcgcagagttaaacttttcttttcattaagcagtttggaaacactgtttatgtagaatctgtgaagggatactttggagtgcattgagggcaatagtgaaaaagaaaatattttcagataaaaactagaaagaaattttctgagaaacttctttgtgatgtgtgcattcatattgcacagttaaacctttcttttgattcttcagtttggaaacactatttttgtagaatctacaaagggttatttgggagcgccttgaggcctagagtgaataaatatattccaataaaaactaaagtaagatttctgagaaactgctttgtgatgtgtgcatcttgcagagttgaaaagttcgtttcattcaacagtttggaaacactgttttttagaatcttcaaagggatatttgggagtgcgttgaggcctatgatgaaaaataaaatatcttcagataaaaagtagaaagaagctttctgagaaacagttttgtgatgtgtccatacatctcacagggttaaacctttctattgattcagcagtttggaaagactgtttttgtagaatctgtgaagtgatgtatgggagtgcattgaggccaacagagaaaaagaaaatgtcttcagataaaaacaagaaacaagattttgagatactgctttgtgatgtgtgcattcatctcacagagtgaaattttcttttgattcagcagtttggaaacactgtttttgcataatctacaaagggatacttgggagcacattgaggcctatggtgaaaaagaaaatttgctcggataaaaactagaaagatgctttctgagaaactgctgtgtgatatgtgcattcatctcacagagttaaaagtttctattcattcagcagtatggaaacactgtttttgtccattctgtgaatggacatttgggagctcattgaggctgactgtgaaaaagagaatatcccaggataaaaactagaatgaagctatctgagaaacctctttatgatgtgtgcattcatctgatagagttaaactattttttcattcagcagtttgcaaacactatttttgtaggttctgcaaatgggtatttgggagcgtattgtggcctatggtgaaaaagaaaatatcttcagataaaaactagaaggactctttctgaaaaactgctttgtgatgtgtgcgttcatctcacagagttgtacatttcttttcattcagcagtttgtaatgttttttgtccattctaccaatggacatttgggagttcattgatgccaatggcgaaaaagtgaatatcccaggacaaaaaccagaaggaagctatctgagaaactgctttgtgatgtgtgcattcctctcagggaattaaaactttcctttcattgggcagttcggaaatactgtttttggtgaatctgcaaagggatattttagagcacattgaagcctaaggtgaaaaagaaaataccttcagataaaaactagaaagaaactttcggagaaactgctttgtgatgtgtcattcatctcccaaagttaaacctttcttctgattcagcagtttggaaacaatttttgtccattttgcaaatggaaatttggcagcatatttaggtcaatggcaaaaaagcaaatatcccagaataaaaagtagaaggaagctttctgagaaacttctttgtgatatgtgcattcacctcacagagttaaaagtttcttttgattctgaattttggaaacactgtttttgtccattctgtgaatggacatcggggagctctgagaccaatagcaaaaaagcgaatatctcaggataaaaactagaaggaagctgtctgacaaactgctttgtgatgtatgcgtacatcttgcagagataaaccgttcttttcattaagcagtttggaaatactgcttttgtagaatctgtgaagggatattttggagctcattgaggcctaaggcgaaaaatcaaatatccaaagataaaaactagaaggaagatatctgagaaactcctttgttatgtgtgcatttgtctcacagacttaaaactttcttttgattcagcactagaaaaaagctttgtgtttgcagaataaaacttttcattcagcagtttggaaacactgtttttgtagaatctgcaaaggaatatttgtgagtgcattgaggcctatggtgataaagagaatatgtttggatcaaaactagaaagaagctttctgagtaagtgctttgtgatatgtgcattcatcttgcagagtgaaacctttttattttggcagtttggaaacactgtttttgtccattctgcaaatggacatctgggagctcaatggagtcaatggtgaaaaagaatatgccaggataaaaactagaagaaatgtatctgagaaaccactttgtgaggtgtgcattcattttgcagactgaaaccattcttttcattcagcagtttggaaacactgtttttctagaatctgcgaaggaatatttgggagcattttgaggcctacggtgaaaaagaaaatatcttccgataaaaattggaaagaagatttctgagaaactgctttgtgatgtatgcattcatgtcacagagttaaacctttcttttgattcaccagtttggaaacactgtctttgtagaatctgtgaagggatatttgggaacccattgaggcctatggtgaaaaagaaatcttctgataaaaactaaaagaagctttctgagaaactgctttgtgatgtgtgcattcttcttgcagagttaaaccgttcttttcattcagcactttggaaacactgtttttgtagaatctttgaagggatatttgggagcgcattgaggcctatgttgaaaaagtaaatatcttcagataaaaattaaaaagaagctactggagaaacagctttgtgatgtgtccattcatctcacagcattcaactttttttttgaatcagcagtttggaaagactgtttttgtagaatgtgcaaagtgatatatggcctcattgaggccaatagtgaaaaagaaaatatcttcagataaaaacaagaaagaagctttctgaaaaactgctttgtgatgtgtgcattcctctcacggagttaaaactttcttttctttggggaatctggaaatattgtttttttagaatctgccaagggataatttggagcacattgaggccaatagtgaaaaccaaattatcttcagataaaaactagaaagaagttttttgagaaactgctttgttatgtgtacgttcatctcatagagctaaacctttcttttgattcagcagtttggaaacactgttttggtccattcagtgaatggatatttgggagctcttgggccagtaatgaaaaagtgaatatcccaggttaaataactggaaggaagctgtctgagaaactactttgtgatgtgtgcatatatctcacagagataaaccattcttttcattaagcagtttggaaacacagcttttttaggatctgtgaagggatatttgggagctcattgatgccaaaggtgaaaaagcgaatatccaaagataaaaactagaaggaagatatatgagaaaccctttgttaagtatgcattcatctcacagagttaaaactttttttgattcagcattttggaaatactgtttttgtagaatctgtgaagggatatttcggagcgcattgaggcctatggtgaaaaagaaaatatcttcagataaaaactagaaaaaaagctttatgagaaactgctgtgtgatgtgtgcatttatctcactgagttaaaacgttccattgattcagaggtatggaaacactgtttttgtagaatctgcgaagggatatttgggagcgcatgcggcctatggtgaaaaagaaattatcttcacataaaaattagaaggaagatttcaaagaagctgatttgtgtcttgtgcattcatctcagatagttaaatctttcttttattcagcagtttataaacactgtttttgtccattttgtgaatgggcttttgggagcccattgaggccaatggcaaaaaagcaaatatcccaggataaaagctagaaggaagctatctaagaaactgctttatgatgtctgcattcatctcacagagttaaacatttattttcattcagcactttggaaacagtgtttttgtagaatctgcaaagggatatttgggagcatattgaggcctatggtgaaaaaggaaatatcttcagattaaaacgagaaaggaccatcctgaaaaactgcttcatgatgtgtgcattcatttcacagagctaaacttttctttcaattctgcagtttggaatgactctttttctccattctgtgaatggacatttgtgagctcatcgagggcaatagccaaaaagccaatatcccaggataaaaactggaaggaagctatctgggaagcgactttgtcatgtgtgcattcatctcacatcatgaaacctttctttttcatttagcagtttggaaacacggtttttgtagaatctgcgaagtgatatttgggagcacattgaggcctatgttggaaaagaaagtatcttcagataaaaactgaaaagaagctttctgaaaaactgctttgtgatgtgtgcattcatctgacagagtgaaaactttcttctgattcagcagtttggaaacactgtttttatccattctgcgaatggacatttgggagctcatagacaccaatggcgaaaaagtgaatataccaggataaaacctagaaggaagctatctgaaaaactgtcgtgtgatgcgtgaattcatctcacagtgataaaccattctttccattaagcagtttggaaacactgtttttgtagaatctgcaaagggatatttgggagcacactgaggccaatggtgaaaaagaaaatatcttcagataaaaactagaaagaagctttctgagaaactgctttgtgatgtgtgtattcacttcacagagttaaaagtttcttttgaatcagcactttggaaaaactgtttttttccattctgcaaatggacattcaggagctcattgaggtcaatggtgaaagactgaatatcccaggataaaacctaaaaggaagctatctgagaaaccactttgcgatgtgtgcattcatctcacagagttaaatttttcttttgattcagcagtttggaaacactatttttgtccattctgcgagtggacatatgggagctcattgagaccaatggtgattacacaaatgtcccaggataaaaactagaaggaagctctctgagaaacagctttgtgatgtgtgcattcatttcacagagtttaaactttcttttgattcagcagtttggaaatgctgttttcccagaatctgagaagggatattagggagctcattgaggccaaagttgaaaaagaaattagcttcagataaaaactggaactgaaaaactgctttgtgatgtgaacattcatctcacagagttaaatttttcttttaatttagcagtttggaaacattgtttttgcccattctgcgaatggacatctgggagttctttgagaccaatggcgattatgcaattataccaggataaaaactagaaggaagctatctgagaaaccgctttgtgaagtgtgcattcatttcacagagtgaaacctatcttttcattcagcagtttggaaacactgtttttgtagaaatatctaagggatattttgagtgcattgaagcctgtggttaaaaagaaaatatactcagatgaaaactagaaagaaggtttctgagaaactgctttgtgatgtgtgcatttatctcacagagcaaaacttttctttttattcagccgtttggaaacactgtctttgtccattctgcaaatgggcattttggagctcactgaggtcaatggcaaaaaaacaaatatcccacggtaaaaataagaagaaatctatctgagaaaccgctctgtgatgtgtgcattcatctcactaagttaaacctttctgttgattcataagtttggaaacactgtttttccacaatctgcgaagggatatttgggaacatattgagcactatggtgaaaggaaaatatcttcagatacaaactactaagaagctttctgagaaactgctttgtaatgtgttcattcgtctcccatagtcaaaactttcttttgatttgtgagtttggaaacactgtttttgtcctttctgtgaatggatattttagagctcattgaggccaatgacaaaaaagtgcaaatccaaggataagaactacaaggaagctatctgagaaaccgatttgagatgtctgcattcatcttgcagagttaaacatttgttttcatgcagtagtttggaagaactatttttctagaatctgcacagtgatatttgggagcgcattgaggcttagggtggaaaagaaaatatcttcagataaaaattataaagaagctgtctgagaaaatgctttgtgatgtgtgcattcatcttacagagttaaacctttcttttgattcagcaggttggaaaccctatatttgtccattattcgagtggatatttggcatatcattgaggccaatggcaaaaaagcgaatatcccaggataaaagctagaaggaaattatctaagaaaccaccttgttgtgtgtgcattaattgcgcagagttaaagcttccttttcattcagcagtttggaaatgctttttttttgtagaatctgtgaagggatatatgtgagtgcattgaggcctatggtaaaaagaaaatatcatctagataaaaaactagaaagagattttctgagaaactgctaggtgattgtccattcctctcacagattgaaaccttcctcctattgtagcagtttggtaacaccattttagtctattctgcgaggggacattttggagcttatttaggccaatagcaaagaaacgaatatcacaggataaaaactagaaggaagctatctgagaaatggctttttgatgtgtgcatttatctcacagagttatacctttattttgattcagtagtttggaagcactgtttttgtagaatctgcaaagagatatttggtagcacattgacgcctctggtgaaaaagaaaatatcttcggataaaaactagcaagtaactttctgagatactgctttgtgatgtgtacactcatgtcacagagttaaaactttccttggattcagaggtttggaaacaccatttctgtagactctctgaaggtatatttgggagtccactgaggcctaaggtgaataagaaattaacgttgataaaatgtagaaagaatctttctgagaaaccactttctgataggtgcatgcatctcatagggttaaatgtttctttacattgagcagtttgaacacactgtttttggagaatctctaaagggatatttgtgagcgcattgaggcatgtgatgaaaaaaatgccttcagataaaaactagaaagaagctttctgagaaactgcttaatgaggtgtgcattcatctcacagagttaaacgtttcttttgattcagcagtttggaaacactgttttggttcattctgcaaatggacattttggaactctttgaggcctatggggaaaaagcaaatatccttggatagaaactagaaagaagctatctgagaaaccactttgtgatgtgtgcattcatctcacatagttaaacctttcttttcattcagcagtttggaaacactttttttgtacaatctgtgaagggatatttgggagtgtattgaggcctatggtgaaaaagaaaatatcttcagataaaaaggagtaggaatgtttctgagaaactgtttcatgatgtgtgcattcatctcaaaaagttaaacctttcttttgattcagcagtttggaaacactatttttctaaaatctgtgaagggatatttgggagtgcactgaggcctagggtgaaaaagaaaacatcttcagttaaaacctataaagaagctttctgagaaactgctttgggatatgggcattcatctcacagactttaacctttcctttgattcatatttggaaacactgtttttttttttagattatgcaaagggacatttgggagcaatttgaggcctatggtgaaaaagaaaatatcttcaggtaaaaactagaaagaagctttctgagaaactgttttgtgatgtgtgcattcgtgtcccagagttaaaattttcctttgaatcagcagtttggaaacactgttttgtctgttctgtgaatggacacttgggagctcattgaggccaattgagaaaaagtaactatcccagaataaaaactagaaggaagctatttgagacacccctttataatgtgttcattcatcttgcagagttaaaccattcttttcaatcaccagtttggaaaaactgtttttgtacaatctgcaaagggatatttggtagcacattgacgagtatggtgaaaaaaatcttcagataaaaactagaaagaaggtttctgtgaaactgaattgggatgtgtgcattcatgtaacagaggtaaacctttcttttgattcagcagtttggaaacactgtttttgtccattctgtgaatggacatttgaaagctcattgatgaaaacagcaaaaaagccaatatcccagggtgaaaactagaaggaaactgtctgagaaaccactttgtgatgtgtccattcatctcacagagttaaactgatcttttcattcagcaatttggaaacactgtttttgtagaatctgcaaaaggatatttgggagcaaattgaggccagtgttgaaaaagaaaatatctccagttaaaaactagaaagaagatttatgagtaattgctttgtgatgtgtgctttcatctcacagagttcaatctttctttttattcagcagtttgggaacattgcttttctagaatctgtgaagggatatttggtagcgcattgagccttacggttaaaaacaaattatcttcagataaaaacttgaaagaagcttagtaagaaactgctttgtgatgtgtgcattcatctcacagacttaaacatttctattgactcagcactttggaaacactgtttttgtccattctgcgaatggatatttgggagctcattgaggccaaaggcaaaaaagccaatatcccaggattaaaattagaaggaagctgtcttagaaaccgcttggtgatgtgtgcgttcatctctcagagttcaaccattagttgtattcatctgtttggaaacaccgtttccaggatatttcagagcacattgaggcctatagtgaaaaagaaagtatcttaagataaaaactagaaagaagttttctgagaaactactttgggaagtgttcatttatctaacagagttaaacctttcttttgattcggcagtttggaaaccctgtttttaaccactctgtgaatggacttttgggagctcattgaggtcaatggtgaaaaagcgaatatcccagtaaaaaaactagaaggaagctatctgagaaactgctttgtgatatgtgcaattgcctaggggagttaaatctttcttttcattcaccaatttggaaacaacgtttttacagaatcttcaaagggatatttgggagtgcaaggaggcctatggtgaggaaaaaaatatcttcagataaaagtagaaagaagttttctgaaaaactgctttgtgatgtgtgcattcatctcactgagttaaaccattccttggaatcagcagtttgtaaacacaatttttgtacattgtgtgaaagggcattttgtaactgattgaggtctaaggtgaaaaagcaaatatcccgggataaaaactagaaggaagctgttagagaaaccactttgtgatgtgttcattcatctggcagagttaaatctttcttttctttcagtagtttggaaacactgtttttgtagaatctgtgaatggacatttggcagcattttgaggcctatggtgaaaaggaaaataacttcagataaaaaatagaagaacgctttctgagaaactgcattgtgatgtgtgcattcacctcatagattcaaacctgtgttttgattcagcagtttggagacagtatttgtccattctgccaaaggacatatatgagttcatggaggccaaaggcaaaaaagaaaatgtccaagaataaaaccagacataagctatctgagaaaccgctttgtcatctgcacattcatctcatagaggtaaagcattctcttcattaagtaggttggaaacacagtttttgtagaatctgtgaagggctatttggagcttattgatgccaaatgtgaaaaagccaatatcccaggataaaaacaagaaggaagctatctgagaaactgctttgtaatgtgtacatttaactggcagagtgaaaactttcttttaattgaacagtttggaaacgagtttttgtagaatctgccaagggatatttgggaatgcattgaggcttatggtgaaaaggaaaatatcttcagataaaaactagagagaatctttctgagaaactgctttgtgctgtgtgcattcctctcacagagttaagcctatcttttgattcagcagtttggaaacactgtttttgtagaatctgtgaagggatacttgggagggcattgaggcctatggtgcaataaaaatatgttcagataaaaactagaaggaagctttcagagaaattactctgtgatgggtgcattcctctcacagcattaaacttttccttagattcagcagttctgaaagtctgtttttgtccattcttcgaatggacattttggaaatgactgaggccactgatgaaaaagccaacatcccaggataaaaaactagaaggaagctgtctgagaaactgctttgtgatgtgtgcattcatctcacagaggcaaacatttctgttgattcagtagtatgaaaactgtttttgtccattccatgaatggaaatttgggagctcattgaggttaatggtgaaaaaggaatatcccaagataaaaacttgaaggaagctatctgagaaacactttatgatgtgcacattcatcttgcagagttaaacctttcttttgattgagctgtttggaaatactgtttttatagaatctgcaaagagatatttgggagtgcatggaggcttatggtgaaaaaaatctcttcaaatacatctagaaagaagcttttggagaaattgatttgtgatgtgtccattcacgtcacagaggtaaacctttcttttgattcagctgtttggaaacactgtttttatccattctgtgaatggagagttgggagctccttgaagccaatggtgaaaaactgaatatcccagaataaaaactagaaggaagctatttgagaaatggctttgtgatgggagtattcatctcacagagtgaaaccttacttttcattcagcagtttggaaacactgtttctctagaatctgtgaaggtatatttgggagtgcattgaggtctatggtgaaaaataaattatcttaagataaagccagaaagaagctttctgagaatttactttgtgatgtgtgcctttatctcacagagttaaaccttttattcagaagtttggaaacactgttttgtccattcagcaaatggacattttggagttctttgaggccaatggtgaaaaaacgaatatcccaagatgaaaactagaaggaagctatctgaaaaactgctttgtgatgtgtgcaatcatctcacagagtgaaacgttgcttttcattcagcaggttcaaacaatatttttataaaaactagaaagatgtttctgagaaactgcttgacgtgtgctttcatctcacagagttatacctttcttttcattcagcagtttggaaacactgtttcggtttattctgtgaatggacttttgggagtgcattgaggccaatggagataaagggaatatcccaggataaaaactggaggaaactaactgagaaactgttttgtgagatgtgcatccatctcatagaggtaaacgtttgttttcattcagcattttggaaacactgttattttagaatctgtgaagggatatttggtagtgcattgaggcctagggtgaaaaagaaaatatgttgagataaaaacgggaaagaagctttctgaaaaaattctcagtggagtgtgctatcaactcagaatcaaacatttcttttcattcaacagtttggaaacactgctttttttttacaatctgcgaatggacatttgggagctcattgaagccgacagcgaaaaagcgaatattccaggataaaaactagaaggaagatgtctgagaaacagctttgtgaggtgtgcattaatctctcaagttaaactgttctttacattctgcagtttggaaacactgtttttgtagaatctgcaaagggatatttgggagggcattgaggcttatagtgaaaaagaaaataacttcatatgaaatctagaaagaagctttctgagaaactactttgtgaagtgtgtattcatctcacaaagttaaacctttcttttgattcagcagtttggaaaaatgttttgtagcatatgtgaagcgatatttgggagcacattgagtcttatgatgaaaaagaaaatatcttcatgtaaaaactagaaacaatctttctgagaaacttctttgagatgtgtgcattcatctcacagatttaaaactttcttttgactccacagtttggagtcactgttttctagaaactgtgaagggatattagggaatgaattgaggccaatggtgaaaaagtgaatatcccaggttaaaaactagaaggaaactaactgagaaacctcactgtgatgtgtgcattcatctcacagagtgaaatcttaatttttattcagcagtttggaaacactgtttttgtagaatctgcagtgtaatattttggagcacattgaggcctaaggtgaaaaagaaaatatcttcagataagaactagaaagaagcttttggagaaactgatttgtgatgtgtactttcatctaacagagttcaacttttgttttattcagcagtgtggaaaccctgtttttgtccattctgtgaatggacatgtgggagctcacagaggctgacagtgaaaaagggaatatcccaggataaaaactagagggaagttatctgagaaaccactttgtgatgtgtgcattcatctcacagagttaaactttcttttcattctgcattttggaaacaatgtttctgtagaatctgcgaggtgatatttgggaccatattgaggcctatggtgaaaaagaaaatatctccagataaaaactagaaagaaactttctgagaaatttctttgtgatgtgcgcattcatctcaaagaggtaaacctttcttttgtttcagcagtttggaaacactgtttttgtccattctgtgaattgatatttgggagatcattgaggccaatggcagaaaaacaaatatcgcaggataaaaattagaagaaagctatctgagaaaccgatttttgatgtgtgcattcatctcacagttaaacttttcttttcattgaacaattgggaaacactgtttttttataatctgtgaaattatgtttgtgagtgcattgaagcctaaggctaaaaagcaactataacaggataaaaactagaaggaaactttttgagaaactgctttgtgatgtgtgcattcatctcacagagataaccttacttttgattaagtagtttggaaatactttttttttttttttttttgagacggagtctcgctctgtcgcccaggctggagtgcagtggcgggatctcggctcacttcaagctccgcctcccgggttcacgccattctcctgcctcagcctcccaagtagctgggactacaggcgcccgccactacacctggctaattttttgtatttttagtagagacggggtttcaccgttttagccgggatggtcttgatctcctgaccttgtgatctgccagcctcggcctcccaaagtgctgggattacaggcgtgagccaccgcgcccggccggaaatactttttttgtccatgctgcaaatggacatgagagctcattgagtccaatggcaaaaaagcaaatatcccaggataaaaaccagaaggaagctatctgagaaaccgctttgtgatgtatgcattcatctcacagacttaaacctttcttttcattcagcagtttggaaacaaggatttggtagaatctgcaaagggatattttggagcacattgagtcctatagtgaaaaagaaaatgtcttcagataaaaactagaaagaagatttctgagaaactgctttgtgatgtgtgcattcttcacacagaggtaaacttttcttttgattcagcagtttggaaacactgtttttgtccattctgtgaactgacattttggagctcatggaggccaatggtgaaaaagagaataccccaggataaaaactagaaggaagctacctgagaaatcgttttgtgatgtgtgcattcatctcacagagttaaagcattctgttaattcaacagtttgtaaacactgtttttgtagaatccgcgaagggatatttggaagcacattgaggactattgtgaaaatgaaattatcttcagataaaaactagaaagaagcattgagagaaactgctttgtgacttgtacattcattttacagagttaaaatttcttttcattcagcagtttggaagcactgtttttgtccattctctgaatggacttttgggaggtcattgaggccaatggcaaaaaagtgattactccaggataaaaactagaaggaagctatctgagaaatggcttagtggtgtgtgtattcaactcacaaagttaaatctctcttttgattcagcagtttggaaacactggttttgtagaatctgcaaaaggatatttggagcacattgaggcctatagtgaaaaagaaaatatattcagataaaaactagaaagaatctttctgagaaactgctttgtgatgtgtgcattcatcttacagaattaaacttttcttttgattcagcagtttggaaacactgtttttgtagaatatgtgaagggatatttgggagcttgttggtgcgaatggtgaaaaagtgaatatcccaagataaaaactagaaggaagctatctgagaaacccctttgtaatatatacattcatctcatagactaaatcttttttttacttagcagtttggaaagactgcttttgtacaatctgtgaagggacatttggaaatgcattgagccctatagtgagaaagaaaatatcttcaggttaaaagttgaaggaagctttctgagaaactgctttgtgatgtgtccattcatctcacagagttaaatctttcttttaattcagctgtttggaaagactgtttttgtagaatctatgaagggatatttgggagagctttgaggcctatggtgaaaataaaataatcaaataaaaactagaaagaagctttctgagaaactgctttgtgatgtgtccattcatctcacagaatgaaacctttcttttggttgaagagtttggaaacactgtttttgtccattctgaggatggacatttgggagctcactgaggacaatggaaaaaaaggaaatgtcccaggataaaacctggaaggaatctatctgagaaaccactttgtgatgtgtgcattaatctctcagagataaactgcccttttaattcagcagtttgggaacactgttttgggagaatctgaaaaggagcttttgagagcactttgaggcctatggtgaaaaagaaaatatcttcagataaaaactagaaagaaactttctgagaaactgctttgtgatgtgtacattcatctcacagagttaaaactttcttttcattcagcattttgggaagtatgtttttgtccattctgcaaaaggacatttgggagctcattcagaccaatggcaaaaaagaaaatatcccaggataaaaactagaaggaagctgagaatccatttgtgatgtgcgcattcatctcacagagtgaaaattttcttttgatacatcagtttggaaacatggtttttgtagaacctgtgaagggatatttgggagcacattgaagcctaagttaaaaaagaaaacatattcagataaaaactagaaagaaccattctgagaaactagtttgtgatgcatgccttcatctcacagtgttaaacgtttcttttgattcaacagtttggaaatgctgtttttgtagagtttgtgaagggatatttgggagctcattgaggcatctggtgaaaagaaaatatcttcagataaaaacctgaaagaagctttgtgatgtatgcattcatctcatagagttacacttttttttctgatttaacagtttggaaatgctgtttatgtacaatctgcgaagggataatttagagcacattgaagccagagatgaaaaagaaaatattttcagataacaaccagaaagaagctttctgattaactgctttgtgatgtgtgcattcatctcacagagttaaacctttcttttgattcatcagttttgaaacactgttttttcccactctgcgaacagacatttgggagctattgaggccaatgacgaaaaagtgaatttcccaggataaaaaaaagaaggaatctactggagaaaccccttcatcatgtttgcattcacttcgtagagtgaatccattcttttgattcatcagtttttaaatactgtttttgtagaatatgagaagggatatttggaagcactttgaagcctatggtcaaaaagaaaatatcttcagataaaaactagaaagaatatttctgagaaactgctttgtgatgtatgcataaatatcacagagttaaacttttcattcagcagtttggaaaaattgtttttgtctattctctgaatggacacatgggaggtgattgaagccaaaggcgaaaaacaaatatcccaggaaaaaaactagaaggaagctatctggcaaacagctttgtcatgtgtgaattcatctggtagagtgaaacctttattttcattcagcagtttggaaacactgtttttgtaggatcagcaaagggatattttggagtgtattggggcctatggtgaaaaaaaaaccttcagataaaaactagaaagaaactttctgagaaactttttgatgtatgcattcaactcacaaagataaaactttctaatgattcagcactttggaaacactgtttttgtccattctgtgaatagatatttgggagctcattgaggtcaactgtgaaaaagtgaataacccaggttagaaatagatggaagctatctgagaaacccctttttgatgctcccattcgtctcgtgcattaaaccattcttttcattcagcagtttggaaacactgtttttgtagaatctgtgaagaaatatttgggagcgcattgaggccaattgtgaaaaagaacattacttcagataaaaactagaaagaagccttctgagaaactgcttagtgatgtgtgcattcatctcacagtgttaaaccttttttttgattcagcagtttggaaccactgttttttcttccattccgcaaatggacatttgggagctcactgagacaagagtgaaaaaacaaatattccaggataaaaactaaaaggaagctatctgagaaactgctttgtgatgtgtgctttcatctcacagacttaaacgtttcttctcattcagcagttttgaaacactgtttttgtagaatctgtgaagggatatttttgggtgctttgaggcctatggtgaaaaagaaataatcctgagataaatctagaaagaagctttctgagaaactgttttgtgatgtgtgcattcatctcacacagttcaaccttcctttttattcagaagtatggaaaaactatttttgtccattctgcaaatgaacatttgtgagctcattgaggcccatggcaacaaagtgaatatcccaggaaaaaaaggagaaggaaggtatctgagaaactgcttttggatgtgtgtattcatctcacaaaattaaacttttcttttcattcagcagtgtataaacactgtttttgtagaatctgtgaatggatatttgggagtgcattgaggcctgcggtgaaaaagaatatatcttcagatacaatctagaaagaagctttctgagaaacttctttgtgatgtgtgcatttttctcagagagttaaacctttcttttgcttcagtagtttggaaacactgtttttgtccactctgctaatggacatttgggatctcattgaggtcaatggtgaaaaacgaatatcccaggataaaaactagaaggaagctatctgagaaactgctttgtgatgtgtgcattcatctcacagattgaaacctttctcttcattcagcagtttggaaacactgtttttgtagaatctaaaaagagatatttaggagcgcattgagttaaaccattcttttgattcagcagttttgaaacagtgttttttgctttctgtgaatggacatttggaagctcattgaggacagtagagaaaaaagggaatattccagtttaaaaactggaaggaagctatctgagaaacctctttgtgatgtgtgtattcatcttgcaaagataaatggttcttttcattcagcagttttgaagcactgttttttgtagaatctgaaaacagatatttgggagtgcattgaggcctgtggtggaaaagaaaatatttgggagtgcatagaggcctatggtgagaatggaaatatctcccaataaaaactaaaatgaaggtttcttagacactgctttgtgatgtgtgcatgcatgtcacagagttaaaactttcttttgattgagcagtttggaaaccctgtttttatagaatctgtgattggatatttgggagtgcattgaggcctatggtgagaatggaaatatctcccgataaaaactaaaatgaagctttctgagacactgctttgtgatgtgtgcattcatgtcacagagttaaagctttcttttgattgagcagtttggaaaccctgtttttatagaatctgcaatcagatatttgggagtgcattgaggcctatggcaaaaaatgaaatatcttcagataaaaactagaaaaaagcttttttcagatactcctttttaatgtatgcgttcatctcacagaggtaaaccttacttttgattgaggagtttggaaacactgttttggtagaatctgggaagggatacttgggaatgcattgaggtctatggtgagaaaagaaatatctccaggttaaaactagaaagaagctttctgagaaactgcttcatttgtctacattcacctcatagagttaaatctttcttttgattgagaagtttggaaaaattctttttgtacaatttgtgaagggatattaggaagcacattgaggcctttggggaaaaaggaaatatcttaagagaaaaactagaaagaagctttctgagaaactgctttgtgatgtgtgcattcatctcacagagttaaacgtttattttgattgagcagtttggaaatattgtttttgtagaatctgcgaagggatattttgtgagtgcaataaggcctatggtaaaaaagcaaatatcttcagagaaaaaatagaaagaagctttctgagaaactgctgtgtgatgtgtatgttcatcacacagagtaaaaaatgtctttttattgagcattttggaaacactctttttttagaatatgtgaagggatattttggagtgcatttaggcctatgattaaataggaaatatcattacagaaaaactagaaagaagctttctgagaatctcttggtgatgtgtgcattcatcacacagagttaaacatgtcttttgactgagcaatttggcaacactgtttggagaatctgtgaaaggatagttgggagtgcattgaggtctatggtgaaaaaggaaataccttcagagaaaaactaggaagatttctcagaaactgctttgtgatgtgtgcattcatctcacatattaaatctttttttttttgattggacagtttggaaacattgtttttgtagaatccacgaagtgttattagggagagcattgaggcctatggtgaaaaacgaaatatcttaagataaatactagaaaaaagatttctgaccaacagtttgtgatatgtgtatttgtctcacagagttaaacctttcttttggttgagcagtttggaaatattgtttttgtacaatctgcaaagggatatttggaagcactttgaagccaatggtgaaaaatgatatatcttcagagaaaaactacaaagaagctttctgaaaaactactttgtgatgtgtagattcatctcacagagttaaaccttgcttttgattgagcatttggaaacactgtttttgtagaatctgcgaagggatatttgggagtgcattgaggcctatggtgagaaaggaaatatcttcagacaaaaaatagaaagaagatttctgagaaattgctttgtgatgtgtgcattcatcacacagagttaatcatgtcttttgattgagtattttggaaacactctttttgtagaatctgtgaacaaatatttgggagcacatggaggccaaagatgaaaagggaaatatcatcagaggaaaaactagaaagaagctgtctgagaaactacttggtgatgtgtgcattcatcacacagagttaaacatttcttttgattgaacagtttggaaactctctttggcagggaattgaagcctaaggtgttaggatatttggcagggaattgagtcttaaggtgaaaaagtaaataccatcagataaaaactaaaaagaagatttctgagaaactgctccatgatttgtgcattcatctcaaaaagttaatgtttcttttgattgaaccatttggaaacactgtttttgtagaatctgctaaggaacatttaggagttcattgaggcctatggtgaaaatggaaatatcttcagagaaaaactagaaagaagcttcctgagaaactgctttgtgatgtgtgcatttacttcacagaattaaaccttacttttgattgagcagtttggaaacactgtttttgtagaatgtgtgaagggatatttgggagcactttgaggcctatggtgagaaaggaaatatcttcagataaaaactagaaggaagctttctgagaaactgctttgtgatgtgtgcatttacttcagagagctaaaccttactttttattgagctgtttggaaacacttttgtagatgtgtgaagggatatttgggagtgcattgaggcctatggtgagaaaggaaatatcttcagataaaaactagaaagaagctttctgagaaactgctatgtgaagagtgcattcatctcacagagttacaactatattttgattaagcagtttggcaacagtttttttgtagaatgttagacgggatatttgggattgctttgaggactatgatgaaaagggagatatcttcagataaaaactaaaaaagaaacattctgggcaactcttttatgatgagtccattcatctcacagcgttaaacctttcttttcattgagcagtttggggagagtgtttttgtagaatcccagaagcgatatttgagagcgctttgatgcctatagtgaaaaacttaatatcttcagataaaaactagaaagaaggtttctgggaaactgctttgtgatgtgtgcattcatctcacagagttaaacctttcttttgattgagcattttggaaacactgttcttgtagaatctgcaaatggacatttgggagggcattgaggctgattgtgaaaaacaaattatcttcagataaaaactagaaagaaaatttttgggaaactgctttgtgatgtgtgcatccatctcacagagttaaaccattcttttgattgagcattttggaaacactgttcttgtagaatctgcaaatggacatttgggagggctttgaggccagttgtgaaaaacaaattatcttcagataaaaactagaaagaaagtttttgggaaactgctttgtgatgtgtgcattcatctcacagttaaaccattcttttgattgagcagcttggaaacactgctttagtagaatctgtgaagggatatatgggagtgctttgaggtttatggtgaaaaaggaaatatcttcagataaaaactagaaagaagcattctcagaaactgctttgtgatgtgtgcattcttcccacagagataaaactttcttttgattgagaagtctggaaacactgtcttggtagaatctacgaagggatatataggagcacctggaggcctatgatgaaaaaggaaatatcttcagagaaaaactagaaagaagctttctgagaaactgctctgtgatgtgggcattcatctcacagaggtaaacctttcttttgattgagcagtttgaaaacattgttttggtagaatctgggaagggatatttgggatcgcatagaggcctatttgtctatgggtcacatggagtctaaacagcatgtttatttctgctatattaaactcctgttaaaacagggtggtgtctgagtaaccacggaaaatacggccactctaatcaacatggtggaaaaacattgtccttggtttcctgaaaaaggaaacttagatgtagaagtatgggatcctgttgctgcaacattctgtgaactggtctccacagggaattatgttcctgtcactgtttggggtgattgggccttggcacatgccatcctgatgacataccaatcctgtgaccctctacagttaccacaattttatgaatctgatgacactccacctcttcctcaaccttcctctcctgcacagccttcgttatctgatcaccctctcccttcagctactccttcccccaactgtcgatgttgagaattcaatgtctaattccagtgactttggattacagtcaccccctgatgatcttatttctttccatgaagagctggtgcttgtagctcctgtggccccgattcacacagcccaggaccatatacatgctaattcttttcttttcaaacctacagagtcacctaatcgctctgggaccaaactaccatttacctataattctttaggccctcccccatccacttcaggccctcactctcctgtcatttcagttcctcaactggtcaccttgccatccactcagcctgcttctctttatccttcttcacatatggatgcccgtaatcaccagtatacttctgctccttctgctcccctaatgcccctttctcacactctcattctggtccgaccccctcaccctcagtttccctgatctacacatgtttttcctgtcacttctatgccgactccatctcagatgcctactctggaaacttcaatgcaatgcttattatgccaaaacaaagaaacaaatatattagatatgtggacttatctggtcgtgttagaccctcctaccttctaaggggtacaaatgcatcgttatgtacctcttaatcttacctttttaaaagaatttaaggatgcttgtactcagtatggtcctacttctccttatgttaaaatggtattacaaactttttgtattgaggtcattttgcttcctttagactgggacattttgtcaaaagctgttttaaccccatctcagcatttacaatttcgtatctggtggtcagaagaggcccattggcaggctcagctaaatcagactaatagcattctaattactcacgctcagctcacaggctccaatagtttctccgatgctcatgcccaattaaactttgatgttcttaccacagaaaaagtaacaaaggtgtgtatgatatctttggatacattatgcacttcaggccaagctcctgtttcttttaccacagttaaacaaggtaactctgaattatacactgattttttagcaaaattagaagatgctgttcaaaattatttctctgatgagcatgctcaaggtattctcctttgtatgttagattttgaaaatgcaaaccatgagtgtaaaatggccatgtgttctgtccaatgacaaaatttacctgatcacgaggtgttgcctgtatatattaaaggtagtgaagacactggatcagacacccacaaagctattctctgggcatgggccatggtggacaccaactaaactggtcccactaattattttcttggagtctgctataattgtggttaacttggtcatactcaaaaaaattgcactgtttaaagcctccaagctggatcaacaaacacagccaaatgctgctgctactgtttgcccacgttgtcgcaaaggtaaacattgggcaagtaattgccactctaagtatgatatagatggaaacctcctgccaaaacaccagggaaatggggactggggccaattctaggccctaatatcaaatgggatacttcagactcagatcaatgttgggtttccacttcaggcagtctcaacacagcccccattacaaacaaatttacctacagccaacccaaattagtccaagcctctccttctctctcagtacaatgcttgtccacctccacagtagggggtggggcagtcgatctctctagtactattcctttaaatttactacctaactctttgcctttaattgttcccacgggggtcactggccctttatctcgaggtttggtaggcctggtgttagatagggcatccacctctggtaaaggaatgaccattcgtaatggtctcattaattctgattccattgatgagattaaattaatcatgtctgccaaggttcctgtttccattctggctggtgagtcaattgctcaattgcttttactacctaatatcgttttaaacaaaggaggtaagacacatggccctggaattggctcttctggtgaaaagcctgatattggattattataatttctaaacaatggctcacctgcacaatacacattcaaggaaataagtttaagggactagtagatactggggctgatgtttctgttatttcctctactttacagccttcctcctggcttaaacatcctgccaacatggcactagtaggtgttggaaatgccaaggaagcttatgagagcacatttatcttgccttgcactggccctgattgtcaaaagggtacaattcggctttttatcacaccaatccccattaatctttggggtagagatttactggcacattggggggctgaaattaatattccacatgactcttatagtgcttccagtcagcatatgatggaaaacatgggatttgttcctggacttggtctcagtccaaaacgtgaagggattactaaacccctcccagttactgtaaaagaaaacagggctggtttaggttatccctatttatggtggccgctgtcacacctcctgatcctatctctttacaatggaaatctgacacacccctttggattcaacagtggctgctttctaaaaaataactggaggctttatctcacttggtttctgaacagttacaacttggaaatgtggaactttctctttcctcctggaattctcctgtgtttctagtaaaaacgacatcaggcaagtggctgatggtaaccaatttaagagtcattagctctgcaattaaatctatggtggcaatccaacctggcatgcctgcccctgatttaatacctttaataattagaacagcttttgccaaaaggtcccagtctaaaggaaacaaaatgacctcagtacaaaaagtttgtaataccattttaacataaggagaagtaggaccatactgagtacaatttacctataattcttcaggccctcccccgtccatttcagcccctcatcctcctgtcatttcggttcctcaactggtcactttgccatccactcagcctgcttttctttacccttcttcacatatggacacccataatcaccagtatatttctgctccttctgctcccccaatgcccctttctcacactctcattctggtccgaccccctcaccctcagtttccctatctacacatgcttttcctgtcacttctctgctgactccatctcaaatgcctactctggaaacttcaatgcaacgcttattacaccaaaacaaagaaacaagtaaattagatgtgtggacttatctggtcactctaataattcctcagggaatactaaatagccctacaatctgcccattttatgttgggcaagttctttcaccagttcaagcccaattttcccaggcctatattcttcattatattgatgatattttaattgctgcccacactgataaagaattaattgactattttcaaagtttgagccaccatgttacagaggctggattacacatcactcaggataaaattcaacagaccacttctgttcaatatttaggaatagtggtcaaaagacaacatattcaaccttaaaaagttgaaattaggagagactctttgaaaactttaaatgacttccaaaaagttttgggtaacattaattatgtaagacctactttaggcattacaacctatgcactgtctaaattgttttctatgctgcagggaaagtccaatctctgcagtctcagaactttgacccctgaggcttcaccagaactggaattcgtagaggaaagaatccaaaccactcagttatctagagtacagccatttcagccttttcaggttctggtttttgcttcattacactctcctactgtactaatagttcaacataatgatttagtggagtggtattttcttcctcattctgtgtcaaaaactttctctgtttatctagatcaaatggccactctaattggacaggcactgtgtagaatacttaaaatttctggatttgatccaaatttaattgtagttcctttaaatcggctcgaagttcaggccacctttcaacattctgtaccgtggcaaattcacttggctgattttattgccattattgacaatcattaccagaagaacaaattgtttgattttataaaaatgacatcttgggtggtccattgattaaccaaagatcagccctttcctgaggcctttacactgtgcagtgatggctccagtaatggcaatgctgattatgtaggtcctacagacaagcttatttgtaccccttacacctctgatcaaaaggcagagttaattactgtcattactgccttgaaggatttccccaaactgggaaatcttctttcaatagcaaataggagaaatatctttttgccttgtgacatttccccaaacctttaaatattgtctctgtatcttcatgtgatctctgtgacccacaccctattagtacactccctccccttttgaaaatcactaataaaaacttggtggttttgtggcttgcacggcatcaaggaacctgccgaaatgtgataactcccccagatacccagctttataatttctctcttttgtactctttccctttatttctcagactggctgacacttagggaaatagaaaagaacctacatgaaataaagttgaattatcaaggacgggttccccgataattttcattcatcagtttggaaacactgtttttgtaggatctgtgaagggatatttggcagcacattaaggcctatgttgaaaaagaaaatatcttcatacaaaaactagaaagaagctttcttagaaactgctttttgatgtgtgcattcatcccacagtgttaaacctttcttttgattcagtaatttgaaaaaactgcttttgtggattctgcaaatggacatctgggatttcattgagggcaatggtgaaaaagtgaatatatcaggagaaaaactagaaggaagctgtctgagaaattgctttgtgatgagtgcattcatcttgaagagttaaaccattcttttcattcagtagttgggaaacactgtttttttagaatcagtgaaggaatatttgggagcgcattgaggcctacagtgaaaaaatcttcagataaaaactagaaagaagagatctgaaaaactgctttgttatgtgtccatttatttaacagagtgaaacctttcttttgattcagcagtttggtaacactgtttttggcgattctgcgaatggacatttaggaactcattgaggccaatgatggaaaagtgaatatcccagaataaaaaccagaaggaaactatctgagaaaccactttgtgatatgtgcattcattttgcagagtgcaaccattcttttcattaagtggtttggaaacactgtttttgtagggtctgcgaagggatatttgggaacgcattgaggcccatggcaaacagaagatatcttcagataaaaagttgaatggaactttcagagaaactgtttgtgatgtgtacattcatctcacagagttaaacctttcttttgattcagcagtttggaaccactgctttggtccattctgcaagtggacatttgggagctcattgaggccaatgacaaaaaagtgaatatctcaggagaaaaactagaaggaagctatctgagaaaccactttgtgatgtgtgcattcatctcacagaattaaaggcttcttttaattcggcagtttgcagacactgtttttataggatttgtgaagtgatattttagaatgcatagaggcctatggtgaaaaggaaaatatcttcagatacaaaatagaaagaatctttctgagaaactgctttatgatgtgtgcattcatctcacagagataaactttcttttcattcagcagattggaaacgctgcttttgtagaatctgcaaactgatatttgggagctcattgaggcctatgctgaaaaagaatctatcttcatataaaagctagaaagaagctttctgagaaagggtttgtgatgtgtgcattcatcacacagagtttaacatttgttttgattcaggaatttggaaacactgtttttctccattctgcaaacagacatttgggagctcattgacgacaatggcaaaaaagtgaatatcccaggataaaaacaagaagaagctatctgaaaaaccgccttgtgatgtatacattcatctcacagaattaagcatttctattcattcagcagtttggaaaaactgcttttgtagaatctgtgatgggatatttgggagtgtttgagatctatggtgaaaaagaaaatatcttcataaaaaactagaaagaatcttttggagaagattgccacatgtgcattcatctcacatagttaaaactttcctttgattcagagttttggaaacactgtttttgtagaatctgtgaagggatatttgggagtgcattgaggtctatgttgaaaatgaatatatcttcagataaaaactagcaggaagcattctttaaactgttttgtgatgtgtgctttcatctctcatagttaatcctttctttctatttagcagtttggataaactgtttttgtccattctgcgaatgcacatttgtgagctcattgaggccagtggtgaaaaagtgaatatcccagcataaaaactagaaggaagctatctgagaaacctctttgtgacgtgtgtattcgtctcacagatataaacctgctttttcattcggcattttggaaacactgtttttgtagaacctgcaaagggatatttgagaatgcattgtctatggtgaaaaagaaaatgtcttcagataaaaactgaaaatgtttctgagaaactgctttgtgatgtgtgccttcatctcacagagtaaccatttcttttaattcagcagtttggaaaaactgtttttgtccattctgtgaatggacatttgggagcacattgagaccaatggagaaaaagtgaatattccaggataaagactagaaggaagctatctgaaaaatcactttgtcatgtgtgcattcatctcacagagataaaccattcttttcattaagcagcttggaatatccatttttgtagaatcagcaaagggatagttgggaggccatttatgccaaaagtgagaaagcgaatatcccaagataacttttagatggaagctgtctgagaaacccccttgtaatatgtgcattcatttcacaaggttaaacttttcttttcgttcagcagtttggaaacactgttttcatagaagctgcgaaggggtattttgaattgcattgaggcctagggtgaaaaagaaaatatcttgagagaaaaactagaaagatgctttctgagaaactgtcttgtgaggtctccatttatctaacagaatgaaagctgtcatttgattcagcagtttggaaactctgtttttgtccattttccgaatggacatttgggagctcattgaagacaatggcgaaaaagcaagtatccctggatgaaaactagaacaaagctatctgagaaattgctttgagatgtttgcattcaggtagcagagtgaaatattacttttcaatcagcagtttggaaacactatttgggagcgaattgaggcctgtggtgaaaaagaaattattttcagataaatacggaaaagaagctttcttggaaactgctttgtgatgtgtgctttcatctcacacagttaatcctttcttttcattcagcagtttgggaacactgtttttgtagaatctgtgaagggatatttgggagcaacttgaggcctatgggaaaaacaaaatatcttcagatatgaactagaaagaagatttctgagaaactgctttgtgatgtgtgcattcatcccacagagttaaacttttgttttcattcagcagcttggaaacactgtttttgtccattttgtgaatggatgttttggagctcattgaggtcaatggcaaaaaagcaagtatgccaggataaaaactacaaggaagcaatctgagaaactgctttgtgatgtgtgcattcatctcacatagttaaacttttctttttattcagaaatttggaatcactgtttttgtagaatctgcaaagggatatttgggagtacattgaggcctatagtgaaaaataaaatatcttcagagaaaaacaagaaagaaactttctgagaaactactttcaggtgtgtacattcatctcacagagttaaaacttttatttgattgagcagtttggaaacactgttttggaagtattgcaaaggtttatttgggagccaattgaagcctatagtgaaaaatgaagtacctttaaataaaaactagaaaaaagctttctcagaaactgctttgtgatgtgagcactcttctcacagtgttaaacctttcttttgattgagcagtttggagacactgttttggtggaatctgcgaagggatatttggaagcactttgaggcctatgatgaaaaaaggaaatatctacagataaaaactagaaagaagctttctgggaaacttatttgccatgtgtgcattcatcttacagagttaaacctttcttttgattgagcaatttggaaacactgtttttgtagaatctgctgagggatatttgggagcgctttgagggcaatggtgaaaaaggaaatatcttcagataaaaactagaaagaagctttctcagaaatcgttttgtagggtgtgcattcttctcacagagttaaacgtttgtgttgattgagcagtttggaaatactgttcttgtagaatctgcgatgggatatatgggagcacattgtggcctatgttgaaaaatgaaatatcttcagagaaaaactagaaagaaaccttctgagaaacagcattgttatgtgtttatttttctaacagatttaaacttttctattgattgagcagtctggaaacactgttttttttagaacctaagcagggatatatgggagagcattgaggcctatggtgaaaaagtaaatatcttctgagaaaaactgaaaagaagctatctgagaaatggctttttgatgtgtgcattcatctcacagagttaaatctttcttttgattgagcagtttggaaacactgttttggtagaatctgcgaagggaaatttgggagcactttcaggcctatggtgaaaaaggaaatatcttcagataaaaagtagaaagaagctttctgataaactgctgtgtgtagaatacattcacctcacagagttaaacttttgttttgattgggcagtttggcagcagtatttttgtagaatctcagaagagatattttgtagcactttgaggcctaaggtgaaaaatgaaatatcctcagattaaaactagaaagaagctttctgaggaaactgctttgtgatgtgtgtattaatctcacagagttaagcctttcttttgagtgagcagtgtggaaaccttcttttggtagaatcaggaaagagatacttgggagcgcatttaggcatatgatgaaaaagaaaatatctttagataaaaaccagaaagaaggtgtctcggcaactgctttgtgatgcaaacattcctccacagagttacaccttgcttttcattgagcaatttggtgacactgttttggaagtaactgcgtagggatattttggagtgcactgaggcctatggtgaaaaaggaaatatcttcagataaaaatttgaaagaagctttctcagaaactgctcggtgatgtgtgcattcttctcaaagagttaagccctacttttgattgagcagtttggaaacactgttttggtagaatctgtgaggggatattagggagcgctttgaggccaatggtgaaaaagcaaatatcatcagaagaaaactagaaagaagcattctgggaaactgctttgtgaggtttgcattcatctcacagagataaacctttcttttgattgagcagtttggaaacactgttgttgtagaatctgcagagggttatttgggagcccatttaagcatatgttgcaaaaggaaatatcttcagataaaaactggaaataagctttctcagaaactattttgtgatgtgtgcattcttctcacagagttataccttccttttgagtgagaagtttgtaaatactgtttttgtagtatctgaaaatggatatatcagagcagattgaggcacagagtgaaaaaggaaatatcttcacagaaaacaagaaagaagctttctgagaaacaacttcataatgtgtaaattcttctaacagggttaaaactttcttttgatggagcagtctggaaacactgttttggtagaatccactgagggatatatgggagggcattgatgcctatggtgaaaaaggaaatatcttcagagaaaaattagaatagaagctttcagagaaattactttgtgatgtgtgcattcatctcacagagttaaacctttcttttgattgagcagattggaaacaatgttttggtagaatcagtgaagggatattttggagtgtattgaggcctatggtgtaaaaggaaatatcttcagagaaaaagtacagggaagctttctgagaaactgctttgagatgagtgcattcttcacacagagtaaaacctttctttgattgggccacttggcaacagtgtttttgtagaatctgagaaaggatatttgggagcactttcaggcccatggtgaaaaacgaaatatcttcagataaaaactagaaagaaacattctgggaaactgccttgtggagtgtgccttcatctcacagagttaaccctttcatttgattgtgcagtgtggaaacactcttttgttagaaactgtgaagagatatttcggagcacattgaggcccatagagaaaaatgaaatatcttcagataaaaactagaaagaagctttctcagaaattgctttgtgatgtgtgcatccttctcacagcattaatcgtttcttttgattgagcagattggaaacactgtatgtgtagtatctgtgaagagatattttggagcacattgaggcctatggtgaaaaaggaaataccttcagattaaaactagaaagaagctttctcagaaaccactttgtgatgtatgcattcttctcacagagttaaacattccttttgatggagcagttcggaaatactgtttttgaagaatctgagaagggatatttcggagtgctttgcagcctatgttgaaaaagcaaatttcttcagatgaaaagtagaaagaagctttctgagaaactgtcatcttgggaatgagtgcaatcatctcacagagttagacctttttattgattgagcagtttggcaacaatctgcagttttaggcaatctgcagagggatatttgggatcgctttgaggcctatgctgaaaaaggaagtgtctttagaaaacaactagaaagaaactgtctgagaaactgctttgtgatgattgcattcatctcccagagttaaacctttctttcaattgagccgttttgaaacactgtttatgtggaatctgcgatgggacattttggagcgcttgtggcctgtggtgaaaaaggaaatatattcagataaaaactagaaagaaggttcctgagaaacagttttgtgatgactgcattcatctcacagagttaaactttcctttgattgggctgtttggcaacactgtttttgtagaacctgagaagggatatttgggacgatttgagacatatggtgaaaaaagaaacatcttcagataaaaaatagaaaaaaagatttccgggaaactgctttgcaatatgtacattcacctcacagagttaagcctttcttttgaatgagcagttgggaaacactggttttatagaatctctgaagggatatttgggagcactttgaagcctatggtgaaaaagtaattatcttcagaaaaaaactaaaaagaagctttctgagaaactgttttgtgatgactacatttttctcagagagttaaacctttcttttgattgagcaatttggaaacaatgtttttgtagaatctgcaaagggatattttggagctctttcatgccaatggtgaaaaaggaaacatcttcagataaaaagtagaaagaagttttctgagaatctactttgagatgagtgcattcatcacacagagttaaatctttctttgattgagcagtttggcaacagtgtttttgtagaatctaagggatatttgagagcattttgaggcctatggtgaaaaacagagtagcttcagataaaaactagaaagaagctttctgggaaactgctctgtgatgtgtgcattcatctcatagaattaaatccttctcttaattgagcagtgtggaaacacttttttgtagaatctgtgaagagacatttcagactgcattgaggcctatggtgaaaaaggaaaactagaaagaagctttcttagacacaactttgtgatatgaacattcttctcacagcattaaacttttcttttgactgagcatattggaaacactgtttttacagaatccacgaagagatatttgggagcacattgaggcctaaggtgaaaaaggaaatgtctcagatacaaactagaaagacgctttctaagaaactgtttattgatgtgtgcattcatctcacagagttaaacctttcctttgattgacgagtttggcaacactggctttatagaatctgcgaagggatatttgagagtgctttgaggcctatggtgaaaaatgaaatatcttcacagaaaactagaaagaagctttcagagaaactgctttggaatgagtgcattcatctcacagaattaaacctttcctttcattgaacagtttggcaacactgactttatagattcggcaaagggatgtttgggagcactttgaggcctatggtggaaaaggaaatatcttcagaaagaagctgtctgagaaactgccttgtgatgagagcattcatctcaaagagttaaacctttcttttgattgagcagtttggaaacactgtgttggtagtatctgcaaggggacattttggagtgctttaagtcctatgatgaaaaatgaaatatcttcagatatataatagaaagaagctttctcagaaaccgttttgtgatgtgtctattcttctcacatagttaaaccctttttttgattgagcagtttggaaacactgtattggaaatatctgtgaagggatatttgggagtgctttgaggcctatggtgaaaaaggaaatatcttcagataaaaaataggaagaaactttctgagaaactgctttgtgattaattcattcatctcacagagttaaacctttctttggattgagcagtttggcaacagtgtttttctagaatctaagaagggatattttgggatgctttgaggcttctggtgaataacgaaatatcttcagataaaaactagaaagaagctttctgagaaactgctttgtgatgagtgcattcttttcatggaattaaacctttcttttgattgaccagattggaaacattgtttttgtagaatctgcaaaggaatatttgggagctcttttaggtcaatggtgaaaaaggaaatatcttcagataaaaagtagaaagaagctttctcagaaactgctttgagataagagcattcttcacccagagttaaacctttctttgattgatcagtttggcaacagtgtttttgtaaaatctgagaagggatatttgggggcactttcaggcctatggtgaaaaacgaaatatctgcagataaaaactggaaagaaacattctgtgaagctgctttgtgaagtgtgcattcatctcacagagttaaacctttcttttgattgagcagtgtggaaacattgttttggtagaatttgtgaaaagatatttcggagcgcattgaggcttagggtgaaaaaggaaatgtcttcagataaaaactagaaagaaggtttcttagaaagcactttgtgacatgtgcattcttctcacagtgttaatcttttcttttgattgagcagattgaaaacactgtatttgaagtatctgtgaagagatatttgggagcatattgaggcctatgatgaaaaaggaaatatcttcagatacaaactagaaagaggctttctcagaaacatttttgtgacgtgtgcattcatctcacagagttaaacctttcttttaattgaggagtgtggaaatatttttgtgttgaatatgagaagagaaattttggagtgcttttaggcctatggtgaaaaaggaaatatcttcaaatgcaaactagaaagtagctttctgagaaactgctttggaatgagagcattcatctcatagagttaaacatttcttttgactgagcagtttggcaacactggctttatagtatctgcaaacggatattttggagtgctttgaggtctaaggagaaaaagggaatgtcttcagaaaaaactagaaacagcttttggagaaactgctttttgaagtgtgcattaatcacacagaatgaaaccttaatttgattgagtagtttgggaaaagtgttttcacagaatctgtgaaagggtatttgggagagactagggtgaaaaaggaactacattcacagaaaaactagaaagaagccttctgagaaactgctttgtgatgtgtacatacatctcacagagttaaacctctcttttgattaagcagtttgtccacagtgtgtttttagaatctgagaagggacagtaggaggcactttgaggcctatgatgaaaaatggaatatcttcagataaaaaatagaaagaagctttctgagaaactccttggaatgagtccattcgtctcacacagttaaacgtttcttttgattgagcagtttggcaacactggttttaaagaatctgtgaagggatatttgggagcgctttgaggcctatggtgaaaaagaaaatatcttcagaaaaaagtagaaagaaacgttctctgaaactgctttgtgatgagtgcattgttttcacagagttaaacctttcttttgattgagcagtttggaaacactgtttttgtagaatcttcgaaggtacattttggagcacattgaggcctatggtgagaaaggaaatatcttcagagaaaaactagaaagaagctttctcagaaaccgttttgtgatgtgttcattcttctcacagagttaaacttatcatttgattgagcagtttgcaaacactttgtataatattcaaagggactttttggagctcattgaggcctacagagaaaaaggaagtattttcagagaaaaaatagaagctttctgagaaactgctttgtgatgtgtgcaatcttctaacagagataatctttccttttgattgagcagtctggaaacactgcttttgtagaatcttcaaagagacatatgggagcgttttgaggcttacagcgaaaaaggaactatcttcttagaaatattagaaagaagctctctgagaaacagctttgtgatgtgtgcattcatctcacagagttaaaactttcttttgattgagcagtttggaaacactgttttggtagaatgtacgaagggatatttgggaaccctttcaggcctatggtgaaaaaggcaatttcttctaataaaaactagaaagaaattttctgagaaactgctttgtggtaagtacattcatctcacagagttaaacctttctttcttttgattgatcagtttggcaacagtgtttttatagaatctgtgaagggatatttgggaggcctttgaggcctatggtgaaaaatgaaatatcttcagataagaaatagaaagaagctttctgggaaactgcattgtgatgtctgcattcatctcacagacttaaacctttcttttgatgagcagtgtggaaacacgttttgatagaaactgcaaagagatattttggaacacttttaggcctattgtgaaaaaggcaataacttcagagaaaaactagcaagaagctttctcagaaaccgttgtgtgatgtctgcattcagctcagagtgttaaacccttcctttctttgagcagtttggaaacactatttagttagaatctgtgaagggatatttggaaatgcattgtggtatatagtgaaaaaggaaatatcttcggataataactagaagtcagttttttctgtaactgctttgtgataagtgcatttatctcacagagttaaacctttctgttgactaagcactttggaaacactgttttggtagaatctgtgaagggatagttggaagtgcattgtggcctgtggtgaaaaaggaaatatcttcagatcataactataaagaagctttctgggaaactgctttgtgatgagtgcattcatctcacagagttaaacatttctattcattgagaagtttggtaacagtgttttgtagaatcagagaagggatatttagaagcactttgaggcatatggtaaaaaacaaaatatctaaagatagaaactagaaataagctttctcagaaatggttttgtgatgtgagcattcatctcacagggttaaacctttctttggttgagcagcttggaaacactgttttggtaggttctgtgaagggatatttgggagtgcttccatggttatggtgaaaaagaaaatatcatcaggtaaaaactagaaagaagctttctgagaaactgttctgtgatgagtacactcttcacagagttaaacctttcttttgattgagcagtttgccaaaagtgtttctgtggaatctgagaaggaatattttggagccctttgaggcctatggtgaaaaatgaaatatcttcagataaaaactagaaagaaggtttctgggaaactgctttgtgatgtgtgcattcatctcaaagagttaaacttttcttttaattgagcagtgtggaaacactgtttttgtggaatctgtgaggagttattttggagtgcattgaggcctatggtgaaaaacgaagtatcttccaagaaaaactagaaagaagctttctcagaaatcgttttgtgatgtgtgcattcttctcacagagctaaacttttcttttgattgagcagattggaaaactttttttttttagaatctgagaagggttatatgagagtgcattgaggcctacggtgaaaaaggaaatatcttcagagtaaaactagaaagaatctttctaacatcctgctttgtgagatgtgcattcatctaacaaagttaaaactttcttttgattgagcagtctggaaacactgttttgtgcaatcttccaagggatatgagggagcacattgaggactatgatgaaaaaggaaatatcttcagataacaaatcgaaagaagcagtctgggaaactgctttgtgatgagagcattcatctcactgagttaatcctttcttttgattgagcagtgtggaaacactgtttttgaagaatctacgaagagatgtttgggggaacattgaggcctatagtgaaaaaggaaatatcctcagataaaaactagaaagaagctttctcagaaatggctttatgatgtgtgcattcttctcacagatttaaacttttcttttgatttagcagtttggaaacactgtttttgtagaatctgagaagagatattttggagcactttgaggcctaaggtgaaaaaggaaatctcttcagatgaaaattagaaagaagctttctgagaaactgccttggggtcatttcatttatctaacagagttaaaccatacttttgattgagcagtttggcaacacttgttttatagaatctgcaaaggatatttgagagtgcatttagccctatggtgaaaaaggaaatatcttcagataaaaactagaaagaagttttctgggaaacagctttgtgttgtgtgcattcatctctcagagttaaaaatttcttgttattgagcagtattgaaatattgaaacactgttttggaagtatctgtgaaggtatatttttgagtgcattgaggactatggtaagaaaggaactaccttcagataaaaactaaaagaaggtttctcagaaaccactttgtgatgtgtgctctgttctcaaagagttaaaccttatttttgattgagcgtttgaaaacactgttttggttgaatgtgttaagggatatttcggtgtgctttgaggcctatggtgaaaaaggaaatatcttcagataaaaattagaaagaatctttctaggaaactgctttgtcatgtgtgccttcatttcacagagttaaacctttcttttgatcaagcagtttggagaccctgtttttgtaaaatctgcagaggtgtatttgggagcaatttgaggcctatggtgaaaaagtaaatatcttcagataaaaaccgttttgtgatgtgtgcattcttctcacagagttaaatctttcttttcattgagcagtttggaaatactgtttattttagattctatgaagagatgtatgggagtactttgaggcctatggtgaagaaggaaatgtcatcagagaaaaactagaaagaagctttctgagaaactactttctgatgtgtgaattcatcctgcacaggtaaatttttcttttcattgagcagtttggaaacacggttttggtagaatctgtgaagggatatttggaagcgcattgtggcttatggtgaaaaaggaaatatcttcatataaaaactggaaagaagctttccaggaaactgctttgtgatgagtgcattcaactcacagagttcaacatttattttcattgagcaatttgggaacagtgtttttgtagaatctgagaagggatatgtggaagtactttgaggcatatggtgaaaaatgaaatatcttcagataaaatctagaaagaagctttctcagaaactgctttgtgatgtgagaattcatcccacagtgttaaacctttcctttgattaagcagtttggaagccctgttttggtagaatctgcgaagggatattttggagcactttctggcctatggtgaaaaaggaaatatcttcagataaaaactagaaagacactttcagagaaactgctttgtgatgtgtacactcctctcacacagctaaatcattcttttgattgagcagtttggcaacagtgtttttatagaatctgcaaagggatatttgggagtgatttgaggcctatggtaaaaaacaaaatattttcacataagaaccagaaggaatgtttctcagaaactgctttgtgaggcatgcattcatgtcacagagttaaacctttctattaattgagcagtgtagaaacactggttttatagaatctgtgaagagatatttgggagggcattgaggtctatggtgaaaaacgaagtatcttctgagaaaaattagaaaaacgctttctcagaaaccgctttgtgatgtgtgcattcttctaacacagttaaactttcttttgattgagcagattggaaactcagtttttgtagaatgtgagaatgtatatatgagagcaccttgagtcctagggtgaaaaataaactatcttcagagtaaaactagagggaaattttctgacatcctgctttgtgatgtgtgcattcatctcacagagttaaaacttccttttgattgagcagtctgaaaacactatttttgtacaatctgggaagggctatttggaagtgcattgagacctatggtgaaaaaggaagtatcttcagataaaaactagaaagaagctttctgataaactgctttgtgaaaagaaagctcaagctttcttttgcttgagcagtttggaaacaatgttttggcaggatctgcaaacagatatttggaattgcattgtgggctatggtgaaaaaggaaatatcttcagagaaaaactggaaagaaactttctgggaaactgctttgttatgtgtgcattcatctctctgtgttaaaacttcatttttattgagcagctttgcaacactgtttttgtagaatctgagaagggatattttgagtgctttgaggccaatggtgaaaaaggaaataacttcagacaaatactagaaagaagctttctcggaaactgctgtgtgatgtgtgcattcttctcacagagagcttaacctcgcttttgattgagcagtttggaaacacagtttttgtagaatctgtgaagagatatttggaaacacctcaaggactatggtgaaataggaaggaacttcagataaaattaggaagaagaattctgagaaactgctttgtgaggtgtacattcatcaaatacagttagaactgtcttttgattgagcagattgtaaacacggtttttgtagaatctgcaaaggtgtgtttgggagtgcattgaggcctatggtgaaaaaggaaatatcttcagataaaaactatacagaagctttctgagaatctgcttgatgatgagtgcattcttcttacagagttaaaactttcttttgattgagcagtttgacaacactgtttttgtagaaactgcaatgggacatttgggagagcattgaggcttacggtgaaaaaggaaatatcttcacataaatactagaaagaagaattctctgaaactgctttgtgatgagtgcattcttctcagagatttaaattattgttttgattgggcagtttggaaacactgtttgggtacaatctgagaagggatatttggagggcactgaggcctatggtgaaaaaggaaatattttcagacaaaaactagaaagaagctttctgggaaactgctttgtgatgtgtgaagtcttctcacagagtttaacttcacttttgattgagcagtttagaaacactatttttgtagaatctatgtaagcatatatgggagcacattgaggcctacattgaaaaaggaaatatcttcagagaaaaactttaaagaaacattctcagaaactgctttgtgatgttggcaatcatctcatggagtttaaacattcttttgattgagcagttgggaaacaatgtttttgtggaatctgagaagggttgtttgggaggggatagaggtctgtggtgaagaaggaaatatcttcagaaaaaaactagaaagaagcattctgggaaactgctttgtgatgtctgcattcatctcacagaactaaacttttcttttgattgcacagtttggaaacattcttttggtagaatctgcgaagggatatttgagaatgcattgaggcacacggtgaaaaaggaaatatcttcagataaaaattaggaagaagctttctaagagactgctttgtgatgagtgcattcatctcaccaggttaaacctttctttagattgagcagtttggcaactgtgtttttatagaatctaagaagggatttttggaatgctttgaggcctagggtgaaaaacaaaacatcttcagataaaaactagaaagaagctttctgggaaactgctttgtgatgtgtgcattcatttctctgtgttaaaactttattttgattcagtagttttgaaacactgtttaggtagaatctgcaaagggatatatgggagcatattgaggtctattgtgaaaaaggaaataccttcagggaaaaaccagaaagaagctttctgaaaaacggctttgtgatatgtgtattcatcgcacaaaggtaaaactttcttttaattgagcagttttgaaacactcttttggaagtatctatgaagggatatttgggagtgtattgaggcctatggtgaaaaagtaaatatcttcggataaaaaatagaaagaagcattctgagaaactgctttctgatgagtgcattcatctcatagtgataaaactttcatttcattgagaagtttggcaacactgtttttgtagaatctgcctaaggatatttgggagcactttgaggcctatattcaaaaattaaatatcttcagaaaaaactagaaagaagctttctgagaaacttctttgtgatgagtgccttcttctcacagagttaaacctttcttttgatggaggagtttggaaacactgtttttgtagaatctgcgaaggggtattttggagtgcattggggcttatggtgaaaaagaaatatcttcagataaatactagaaagaagctttctcgaaactgttttatgatgtgtgcattcgacttacagtgttaaaacattctggtgattgagcagttggaaaacattgttttggaaaaatctgccaagggatatatttgggagcccattgaggcctattgtgaaaaaggaaatatcttcagattaaaactagaaataagctttctgagaatctgtttttctataagtgcaatcatctcacagagtgaaacctttcttttctttgagtggtttggcaaaagtgtttttgtagaatctgagaagggatatttgagatcaccttgaggcctatgttgaaaaaggaaatatcatcagataaaaagtagaaagaagctttatggtaaactgctttgtgatgtgtgcgtttatctcacagagttaaacttttcttttcattgagcagtttggaaacactgtttttgtagagtctgtgaagggatatttggaagtgcattttggtctatggtgaaaaaaggaaatatcctcagataaaaataagaaagaagctttctgggaaactactttgtgatgagtgcaattatctcacagagttaaacctttcttttcattgagcagtttgggaacagtgtttttgtagaacctgagaagggaaatttgggagcactttgaggcctatgtggaaaatgaaatatcttcagataaaatcaagaaagaagctttctgggaaactgctttgtgatgtgtgcattaatctcacagagttaaacttttcttttgattgagcagtttggaaacattgtattgttagaatctgtgaagggatattttggagtgcattgaggcctatgagaaaatgaaatatcttcagataagaactagaaagaggttttctcagaaactgctttagaaagtgtgcattcttttcactgagttaaacctttgttgtgattgagcagcctgaaaaccctgtttttttgtagaatctactaagggatatatgggagtgcattgaggcttatggtgaaaaagcaaatatcttcagagaaaaactagaaagaagctttctgggaaactgattcgtgatgtgtgcattcatctcaaagagttaaacctttcttttgatttaacagtttgacaacagtgtttttgtagaatatgagaagggatatttcggagtgctttgaggccaatggtgaaaaaggaaataacttcagatgaaaatgagaaagaaactttctgagaaactgcttggaaagagtgcattcatctcacagagttaaacccttcttttgattgaacagcttggcagcactggttttatagaatctgagaaaggatatttgggagtgctttgagacctatggtgaaaaaggaaatatcttcagaaaaagtagaaagaagctcttttacaaactgttttgtgataagtgcattcatctcaaagagttcaaactttcttttcattgagcagtttgggaacgttgtttttgcagaatctgcaaagggacatttgggagcacatttaggcctgtggtgaaagaggaaatatcttcagataaatactagaaagaagctttctcagaagttgttttgtgatatgtgcactcttcccacagagttaaatatttcttttgatttagcaatttggaaacactgtttttgtagaatctgttgcgggatgtatgggagtgcattgaggcctatggtgaaaaaggaaatatcttcagagcaaaactacaaagaaactttctgagaaactgctttgtggtgcatgctttcttctcacagaatttagactttcttctgattgagcagcctggaaacactctttttgtggaatctttgaaggaatatacgagagcgcatttagccctatggtgaaaaaggaaatatcttcagataaaaactggaaagaagctttcttagaaacttctttgtgatgtttgcattcttctgacagagttaaacctttcttttgatttaacagtctggaaacactgttttggtagaatctgtgaagggatatttgggatcgctttgaggcctatggtgaaaaaggaaatatcctcagagaaaaactagaaagaagctttctgggaaactgtgatgtgtgcagtcatcacatagagttaaacatttcttttgattgaacagtttagaaaaactattttggtagaatctacaaaggaatatatgggagcacagtgagatctatggtgaaaaaggaaatatcttcagatgaaaactggaagaagctttctgtaaagtgctttctgatgtgtgcattcatcacacagagttgaacctttcttttgattgagcagtttggaaacactgttcttgtagaatatgtgaagggatattttggaatgctatgaggcctacagtgaaaaaggaaatatctacagataaaaagtagaaagaagcttatcgagaaactgttttgtgatgggtgcattcatgtcacagaattaaacctttcttttgacagagcagtctggaaacactgtttttgtagaaaccacaaagagatatatgggagtacttagaggagaatggtgaaaaaggaaatatcttcagaaaaaactagaaagaaactttctgagaaaccacttttttatgagtatattcatgtcacagagctaaacctttcttttgattgagcagtttggaaacactatttttgtagaaactgtgaagggatacttggcagtgcatggaggcctatggtgaaaaatgaaatatcatcagataaacactagaaagaagctttctcagaaaccgttttgtgatgtgtgcactcttttcacagagctaaactttccttttgattgagcagtatggaaacactgtttttctaaaatatgcaaagggatatttgggagcacattgtggcctaagatgaaaaaggaaacaccttcagaaaaaacattgaaagaagttttctcagaaactgctttgtgatgtgtgcattctcctcacagagttaaaacttgcttttactgagcagtttggaaacattgttttgatagaatctgtgaagggacactttgaagtacattgtggcctatcgtgaaaaaggaaatatcttcagataaaaagtagaaagaaaccttctaggaaattgctttatgatgggtgcattcatctcacagagttaaacctttcttttcactgagcagtttgggtaccgtatttttgtagtatctggaaagggatatttgcgagtgctttgaggcctatggtgaaaaatgaaatatcttcagataaaatctagaaagaaaccttctgggaaactgcttcatgaaaagtgcattcatccaatagagttaaacctttcttttgattgaggagtttggaaacactgctttggtagaatctgcaaagggatatttgggagtgcatttaggcctatggtgtaaaagaaaatatcttcagacaaaaaccaggaagaagcattctcagaaacagctttgagatgttttcattcttctcacagagttaaacccttcttattattgagctgtttgcaaacactgtttttgcagaatctcagaagggttatttagaaatgctttgaggcctatggtggaaaaggaaatatctgcagaaaaaaactaaaaagaagctttctcagaaaccgctttgtgttgtgtgcattcttctaacagagttaaagctttcttacgattgaacagtttggaaacactgtttttgtagaatctctgaagggatacatatgggagtgcattgaggtctattgtgaaaacagaaatatcttcaaggaaaactaggaagaagctttctgaacaactgtttgtgatgtatgcattcatctctcaaagttaaacctttcttttgattgaaaagtttggagacactgttttggtagaatctacgaagggatctttgggagtttctcagaaacaaaaaagaaggtttctgagaaactgctttgtggtgactgcattaatctcacagggttaaaccttgcttttgattgatcagcttggcaatggtgtttttgtagaatctgtgaagggatatatgggatcactttgagagacctgtggtgaaaaatgaaatatctgcagataaaaactagaaagaagctttctgggaaattgctttttgatgtgtgcattcttctcacagagttaaaacttccttttgcttgagcagttttgtaacactgtttatgtgaaatctgcaaagggaaatttgggagtgcattgaggcttattttgaaaaaggaaataccttcagataaacactagaaagaagctttctcagaaaccactttgtgatgtgtgcattcttctcagagttatacctttcttttgattgagccgttttgaaacactgtttatgtgaaatctgcaaacggaaatttgggagagcattgaggcttatttcggaaaaggaaatatcttcagataaatactagaaagaagtgttctcagaagctgcatggcaatgtgtgcattcttatcagagcattaaacctttcttttgattgagcagtttggaaacactttttttgtagaatctgcgaagggatatttggcagtccattgaggactaaggtgaaaaaggaagtatcttcagataaaaactaaaaagaagctttctgagaagctgctgtgtgatgagtgtattcatctcacagatttttacctttcttttgactgagcagtttggagaccctgtttttgtaaaatctacaaagggctatatgaggctgcattgaggcttattgtgtaaaaggaaacatcttcagataaaaactagaaaggagcattttgggaaacaattttgtgatgtgtgcattcatctgacagagttgaaactttcttttgattgagcagttttgaaacactctttttgtagaatctgcaagtggatatttggagcgctttgcagcctatggtggaaaagcaaatatcttcacataaaaagtagacagaagcattctgagaaacttctttttgatgtgttcattcttctcacagagttaaacctttctttggattgagcagtctggaaacactgtttttaaagaatctatgaagtgatatatgggagcacattgaggcctagggtgaaaaaaggaatatattcagagaaaaattaggcagaattattctgaaaaactgctttgtgatatgtacattcttctcaaagagataaacctttctttttttgagcagtctggaaacactgtttttgtagaatctgtgaagggatatttaggatcacattgaggcctatgctgacaaaggaaatagcctcagataaaaatagaaagtagccctctcagaaaccggttagtgacgttttgcattcctctcacagagttaaaccttcttttttattgagcagtttggaaacagagtttttgtagaatatgccaagagatatttgggagagcattgaagcctatggtgacaagggaaatatcttcagataaaaactagaaagacagtttctgagaaactgctctgtgatctgtgcatttttctcatagagttaaactttctttagattgagcagtctggaaacactgtttttgtagaatatgtgaaaggatatatgggtgtgcattgaggcctatggtgaaaaagggaataccttcagagaaaaactatagagaagctttctgagaaacagctttgtcatgtgtgcactcatctcacagagttaaatctttcttttaattgagcagtttggaaaccctgttttggtagaaactgcgaaaggatatttgggagtgcattgaggcctgtggtgaaaaaggaaatatcttcagataaaaactacaaagaagcttcctcagaaactgctttctgatgtgctgattcctctaacagagttaaaccttccttttgagtgagcagtccggaaacactgtttaatagaatctatgaagtgatatataggagcacattgaggcctatggtgaataagaaaatatcttcagagaaaaactagaaagaagctttctgagaaactgttttgtgatgagggcattcgtctcacagaggtaaacatttcttttcattcagaaatttggaaacaatgtttctgtagaatctgccaagggatatttgggagtggagtgaggcctatggtgaaaaaagaaatatattcagataaatactagaaggatggtttctgagatactgctttgtgatgcgtgcattcttctcacagagttaaaaatttctttagattgagcagtctggaaaaactgtttttgtagaatctacaaggggatatatgggaacacagagtggcatgtgctgaacaaggaaatatcttcagaaaaaaagtagaaagaagctttctcagaaactgctttgtgatggttgcattaatctcacagagttaaacatttcctttgattgcacagctttgaaacactgttttggaagtatctgtgaagggatatttgggagcatatggaggccaatggtgaaaaaagaattatcttcagatcagtactagacagaagctttctcagaaaccactttgtgacgagtaatcatctcacagatttaaaccttccttttgattgagcagtttggaaaaactgttttggtagaatctgcaaaggaatatttgggagcgctttgaaggctatggtgaaaaaggcaataacttcatttaaaaactataaagaagctttctcagaaactgctttgtgatggttgcattcatctcacagagttaaacctttcctttgattgtgcagtttggaaacactgttttagtggcatctgagaaaggatatttgggagctctttgaggcctatgcagagaaaggaaatatcatcaggtaaaaactagaaagaagctttctgacaaactgcttcatgatgagtgcattcatctcacagagttaaacctttcatttcattgagcagtttggcaacattgtttttttggaatctgagaggatatattttgtagtgctttaaggcctagggtgaaaaaggaaatatcttcagataaaaactggaaagatgctttctgggaaactgctttgtgatgtgtgcattcatctcacagagttaaaccttccttttgattgtgcagtttggaagcactgttgtggtagaatctgcaaagggatatttgggagcacattctttggtgaaaaatgaaacatcttcatagaaaaactagaaagaagctttctgagaaaccacttgctggtgtgtgtatttattgcacagagttaaacttttcttttcactgagtcatttgggaacagtgtttttttcaaacctgagaagagatatttgggagcattttgaggcctatgatgaaaaaggaaatttcttcagataataacaacaaagaagctttctcagaaaccattttggtttttctcattcttctcacagagtaaaatctttcttctgatgagcagtctggaaacactttttttgtagaatctatgaagggatatatgggagcgcattgtcggctacggtgaaaaaggaaatattttcagagaaaatttacaaacaagctttctgggaaattactttgatgcgtgcattcatcacacagagttaaactttattttgactgtgtcctttggaaaaactgtctttgtagaatccgtgaaggtatatttgggagcactttgaggcctaaggtgaaaaaggaaatattttcagatagaagctagaaagaagctttctgagaaactgctatgtgatgtgtgcaatcatctcacagagttgaacctttctttagtttgaacggtttggaaaatctgttctggaagaatctgcaaagggataattgggagcactttcagggctatgaccaaaaaggcaataacttcagataaaaactagaaagaagctttctcagaaaccgctttgtgatggttgcattcatctcaaaaggataaacctttcctttgatttcgcggtttggaaacactgttttggaagtatctgcgaagggatatttgggagcgcattgaaggcaatggtgaaaaaggaaacatcttcagatcaaaattaaaaagaagctttctcagaactactttgtgatgtgtgtgttcttctcacagagttaaatcattctttggattaagcgcttttgaaatgctgttttggtagcatctgcaaagggacatttgggagctctttgaagcctatgttgaaaaaggaaatatctgcagataaaaagtagaaagaagctttctgagaaactgctttggaatgagttcattcgtctcacagtgttaaacctttcttttcattgagcagtttggaaacacagttgtacaatctgagaagggatatttgggagcgatttgaagtctatggtgaaaaacggaatatcttcagataaaaactagaaagaagctttctgggtaactgccttgtgatgtgtgcattcatctcacagagttaaacctttcttttgattgagcagtttggaaacactcttttgttagaatctgcggggagatatttgggagcacattgatgtctctggtgaaaaaggaaatagcttcagagaagaactagaaaaaatcttcctgagaaactgctttgtgatgtgtgcattcatcttacagagttaaactcttcattttattgagcagtttgggaacagtgtttttgtagaatctgagaagagatatttgggagtgcttttaggcctatggtgaaaaacgaaatatgttcaggtaaaaactagaaggaagctttccgggaaacagctttgtgatgtgtgcattcatctcacagaggtaaacttttattttgattgagcagtttggaaacactgtttttgtagaatctggaaagcgatattttggagcgcttttaggcctatggtgaaaaaggaaacatcttcagataaaaacttgaaagaagctttctgagaaacagctttgtgatgattgcattcatctcacaggattaaacctttctttcatttgaacagtttggaaacactgtttttatagaatctgtgaagggatatttgggagcacattgaggcctatggtgaaaaaggaaatatcttcagatgaaaacttgaaagaagctttctgagaaacaactttgtgatgagtgcattcatctcacagaactaaaccttacttttgattgagcaatttggaaacgtggtttttctagagtctgcaaaggaatagttggaacgtgttgaggcctaagttggaaaaggagatatcttcagatgaaaactagaaagaagctttctgagaaacttctttttgatgtgtacattcttctaacagaagtacatctttctattgaatgagcagtttggtaacactgttttttcagaatctgtgaaggtatgtttaggaacgcattgaggcctagggtagtaaaggaaatatcctcagaaaaaaatgagaaagatttatgagaaatagcattgtgatgtgtgcattcatcccacagagttaaacctttcttttgattcagcagtttggaaacactttatgtgtagaatctgcaattggatctttgggaacccattgaggcatttggtgaaaaaggaaatatcttgagataaatactaggaagaagccttctcagaaactgccttgtgatttgtgcattcttctcacagatttaaacgtttattttgattgagcagtctggaaacactgtttgcgtgcaatcaatgaagggatatttgggagtgcattgaggcctatggtgaaaaaggaaatatcttcagataaatactagaaagaaactttctcagaaaccaccttgcaatgtgagaattcttcttacagagtgaaagctttttttttgattgagcactctggtaacactgtttttgtagaacatgtgaagggatatttgggaatacattgaggcctatcgtgaaaaaggaaatatcttcagatcaaaactagaaagaagctttctgagaaactgcttttgatgagtgcattcatctcacagaagtacacctttcttttgattgaagtttggcaacagtatttttgtagaaactgagaagggatatttggtagcacattgaggcctatggtgaaaaacgaaacatcttcagatataaactagaaagaagctttctgagaaactgctttgtgatgactgcattcatctcacaaggttaaacctttcttttgattgagcagtttggaaacaaagtttttgcagaatctgtaaagggatatttaggagcacattgaggcctatggtgaaaaaggaaataacttcagatgaaaactagaaagaagctttattagaaactggtttgtgatgtgtgcatccatgtcacagagttaaaattttgttttgattgagcagtttggaaataatgtttcggtagaatctgagaagggatatttgggagcatattgaggcatatgttgagagaggaaatatcttcagataaaatctagaaagaagcattctgagaaactgctttgtggtgtgtgcattcatctcacagagttaaacttttttttttgattgggcagtttggaaacactgtttttgtagaatctgcaatgcaatattttggagtgcttttaggggtatggtgaaaaaggaatatcttcagataaaaactagaaagaaactttctgagaaacagctttgggatgagtgcattcatctcacagagttaaacctttcttttgatcaagcagtttggaaacactgtttttatagaatctgcaaagggatatttgggaatgcattgaggcctgtggtgagaaaggaaatagcttcagatgaaaactagaaagaagatttatgagaaactgctttgtgaagagtgcattcatctcacagacttaaacctttttttgattgaggagtttggaaacggagtttttgtagaatctatggagggatatttgggaatgaattgaggtctatggtgaaaaaggaaataccttcacatataaactagagagaagctttctgagaaactgctttgtgatgtgtgcattcatctcacagaggtaaacgtttcttttcattgagcagtttggaaactctgttcttctagaatctgcaaagggatatttatgagctttttgaggcctaagttgggaaagcagatatcttcagatgaaaactagaaagaaactttctgagaaactgctttttgatgtgtgcattcttctaagagaattaaacctttgtattgaatgagcagtttggcaacactgtttttgcagaatctgtgaagatatatttaggaacacattgagggctatggtgaaaaaggaaatatcttcagaaaaaaatgagaaagatttcttagaaatagcattgtgatgtgtgcattcattcaacagagttaaatcattctttaattgaacagtttggaaacactgtttttgtagaatctgtgaagggatatttcggagcccattgagacctttggtgaaaaaggaaatatcttcaaataaaagctagaaagaagctttccaagaaactgcttttcgatgtgtgcattcatctcacagagtaaaacctttcttttgatagagcagtttggaaaaactgtttttgtagaatctgcaaagggatacttgggggagcattggggtctatggtgaaaaaggaaacatcctcagatgtaaactagaaagaagctttctgagaagcttttttgtgatgtgtgctttcatctcacagagttaaacttttattttgattgagcagtttggaaacacagtttttgttgactctgccaagggatatttaggagtacattgaggactatggtgaaaaaggaaataatttcagacaaaaactagaaagaagctttctcagaaacaggtttgtgaattttgcattcatctcacacagtaaaacccttcttttgatttagcagtttggaaatactgttttggtagaatctgcgaagggatatttgggagcacattgaggcctatgttgaaaaaggaaatatcttcagattaaaaacttgaaagaaacattctgagaaactgctttgtgatgagttcattcaactcacagagctaaacttttcttttaattgagtagtttgaaaatgctgtttttttggtatctgagaagagatatttgggagcactttgaggcctgtattgaaaaaggatataccttcaaataaaaactagaaagaacctttctgggaaaatgctttgtgatgtgttcattcatttcacagttaaacctttttttcaattgagcagtttggaaacactgtttttgtagaaccagcaaagtgatattttggagccctttaggcacatggtgaaaaaggaaatatcttcagacaaaaactagaaagaatgtttctgagaaacagctttgtgatgactgcattcatctcacagacttaaacctttcttttgattgagcagtttggaaacactgtttttatagagtctgtgaagtgatatttgggaacgcattaaggcctatggtgaaaatggaaataccttcagatgaaaactagaaagaaggtttatgagaaacttctttgagaagagtgcagtcatctcacagacttaaacctttcttcttattgagcagtttggaaacactgttcttgtagaatctgcaaagggatatttgggaacttattgaggcctatgttgtaaaaggagatatcttcagatgaaaactagaaagaatctttctgaaaaactcctttctgatgtgtgcattcttctaagagaattaaaactttctattgaatgagcagtttggtaacactgtttttgcagaatctgtgaagacatatttaggaacgcattgaggcctatggtgaaaaaagaaatatcctcagaaaaaaacgagaaagatttctgagaaatagcattgtgatgtgtgcattcatcccacagagttaaacctttctttagttgaacagtttggaaacactctttttgtagaatctgtgaaaggatatttcagagaccattgaagcctatggtgaaaaaggaaatgtcttcagataaaaaccagaaggaagcattctgggaaactgctttgtgatgtatgcattcagcacaaagagttaaatcttacttttgactcagcagtttggaaacactattttggaagtatctgccaagggatatttgggagcgcattgagtcctatggtgaaaaataaaatatcttcagaaaaaactagaaagaagctttctgagaaactgctttgtgatgagtgcttttgtgtcacagagataaacctttcttttaattgagcagttcagaaacactgttttagtagaatctgtaaggggatattgggcagtgcattgatgcctatggtgaaaaatgaaatatcttctgataaaaactagaaagaagctttctgagaaactgctttgtgatgagtgcattcatctcacagggtgaaaactttctttaatttagcgctttgacaccagtgattttgtacaatctgagaacagatatttgggagcacttggaggcctatggtgaataatgaatctgctttgagatttgtgtattcttctcaatgagttaaacttttgtgttgattgagcagtgtggaaacactgtttttttagaatatgtgaagggatattggggagcactttgacgtctatgtcaaaaaaggaaatatcttcagataaatactagaaagaagctttctcacaaactgtgttttgatgtgtgcattcttctcacagatttcaacctcacttttgattgagcagtttgaaaacactgtttctgtaaattataccaagggatatacacgagcactttgaggcatatggtgataaaggaaatatcttgagataaaaactagaaagaatctttctgaaatctgctttgtgatgtgtgcattcatctgacagaggtaaaccgttattttgattaagcagtttggaaacagtttctgtaaattctaccaaggtatatttgggagttcattgaggtctattgtgaaataggaagtatattcagagaaatactagaaagaacgcttctgagaaactgctttgtgatgagtgcatccatctcatagagttgaactttcttttgattgagcagtttggcaaccctgtttttgaagaatctgagaaaggacaattggtagtgctttgaggcctactgtgaaaaatgaattatgttagaaaaaactagaaagaagctttgtgggaaactgctttgtgatttgtgcattcagctggcagagttaatcctttcttttgattgagcagtttggaaacaatgtttttgtaaaacatgcaaagggatatttgggagtgcttcgaggccagtggtgaaaaaggaaatatcttcagattaaaactagaaaaagctttctggaaactgatttgtgatgtgtacattcttatcacagaggttaaccattattttcattgagcactctggaaacactgtttctgtaaaatgtaccaagggatatttaggagtgcattgaggcatatagtgaaaaagaaaatatcttcagatacaaattagaaagaaacatttctgagaaacagctctgggatgtgtgcattcatcatgtagagttaaaatttccttttcattgggccttttgggaacactgtttttgtagaagctgagaacggataattgagagtgctttgacaccaaaagtgaaaaaggaaatatgttagataaaactagaaagaagctttctgggaaattgctttgtgaattgtgcattcatctcacagagttaaacctttcttttgattgaacagtttggaaacactgtttaggcagaatctgcgaagggacatttgggagtgcattgaggcctatggagaaataggaaatatcttcagataaatactagaaagaactttctcagaaactgctttgtgatgtctgcattcttccaccagtgttaaacctttcttttgattgagcagtttggaaacactgtttgtgtacaatcaatgaaaggatacatgggagcacatgggggcctatggtgaaaagtgaaatatctttggagaaaaactagaaagaagctttctgagaaagtgctttgttatgtgtgcattcttctgagagtaaaacctttcttttgaatgtggaatttggaaactgtttatgtagaatctgcaaatgaatatatgggagtgctgaggcctatggtgaaaaaggaaatatcttcagagaaaaactagaaagaaatttctgagaaactgctttgtgatgtgcacattcttcacacagagttagccctttcttttgattgagccatctagaaatattgtttttgtggaatctacgaagggatatatgagattgcattgaggcctaaggtgaaaaaggaaatatctttagataaaaactacaaagaatctttctgagaaactgctacatgatgtgtacattcatctcgcatatttaaacctttcttgtgattgaccagtttggcaacaatgttttggtaaaatctttgaagggtatttgggtgagtgttgaggcctatggtgaaaaaggaaatatctgtagacaaataatagaaagaaggtttctggaaactgcattcatctcacagagttaaacccatcttttgattgagcagttcagcaactctgtttttgtggaatctgccaaggaatatttcggatgcattgaggcctattgtgaaaaaggaaatatcttcaggtaaatacttgaaggaagctttctggaaactgatttgttatttatacattcatctcacagtattaaaccataattttgtttgatcagtttggaaacattgcttctgtaaaattcaccaaggggtatttgggaatgtattgaggcctgtagtataaaaggaaatatcttcagataaaaaatagaaagacgctttctgagaaactgctttgtgatgagtgcattcacctcaaagagttcaactttttttttcaattgagtagcttggcaacaccgtttttgtagaatctgcaaaggggcatttttcagtgctttgaggcccatggtgaaaaaggaaatatcttcacataaacactagaaagaagttttctgagaaactactctgtgatgagtgcattcagctcacagaagtaaacctttcttttgattgagtagtttggaaacactgcttttttaaatctgtgaagggacatttggaagtgcattgaggcctatggtgaaaaaggaaatatctccagataaaagccagaaagaagctttctcagaaactgctttgtgatgtgtgcattcatctaacagagttgaacctttcttttgagtgtgcagtttggaaacactgtttttgtagaatttgtgaagggacatatgggagccctgaggcctatggtgagaaaggaaatatcttcagagaaaaactagaaagaaatttctgagaaactggtttgtgatgtgtgcattctttgcacacagttaaacctttcttttgattgattagtgtggatacattgtttttgtggaatctgagaagggatttgttggagcactttgaggcttatggtgaaaaaggaaacatcttctgataaatactagaaagaagcccctcagaaaccactttgtgatgtgtgcattcttctcccagagtttaatttcatttttgattaagcattttggaaacactgttcctgtaaattctaccaagggatatataaaagccctttaaggcctatggtgttaaaggaaataccttcagagaagaactacaatgaagcattctgagaatctgctttggaatgactgcattcatctcacagagttaaaccttccttttgattgagctgtttggaaacactgttttggtagaatatttgaaatgatatttgggagtgctttgaggcctataatgaaaaaggaaatatattgagaaaaaaataaaaagaagctttctgagaaactggtttgtgataagtgcattcatctcacagaattaaacatttctttttatggagcaatttggaaaaactgtgtttcagaatctctaaagggatatttaagagctccttgaagcctatggtgaaaaaggaaatgtattcagataaatactagaaagaaactttctcagaaactgctttgtgatatgagcattcttctcacagagtaaaacctttcttttgattcaccaggttggaaacactgtttttgtagaatctgcaaaaggatacttgggagcgcattgaggcctatggtgaaaaatgaaatatcttcagataaaaactagaaagaaattttctcagaaaccgctttgtgatgtgtgcattcttctcactgaactcaaccgttcttttgattgagcagtttggaaacactgttttggtagaatctgtgatgggatatttgggagcacattgaggcctgtagtgaaaaaggaaatagcttcagataaaaactagaaagaggctttctcagaaactgctttgtgaattgtccgttcttgtcccagagttaaacctttctcttcattgagtagtttgcacatgctgtttttatagaatctatgaagggatatttgggagtgctatgaggcctatggtgaaaaagaaaatatcttcagataaaatctagaaagaagctttatgagaaactgttttgtaatgagtacattaatttcatagagttaacccttttttgattgagaagttaggaaacatgatttttttacaatctgagaaggaatattttggagtgatttgaggcctatggtgaaaaacgaaatatcttcagataaaaattagaaagaatctttctgggaaactgctttatgatgtgctcattcatctgtaacagttaaaactctcttttgattgagcactttggaaacactgttttgttaggatccatgaaggaatatttgtgcactctttgagtcctatggtggaaaaagaaatatcttcagataaaaactagaaagaagcattctaagaaactgctctgtgaagagtgcattcacctcacagagttaaacctttcttttcattgggcactttggcaacactttttttgaattacttaagaagggatatttgggagtattttaaggctgagggtaaaaaaggaaatatcttcagataaaaactagaaagaagtattctgagaaactgctttgtgatgtgtgcattcagcatatagagttaaaactgttttgattgggcagtttggaaacactgtttttgtagaatttgagaagggatatttgggagctctttgaggcctatggtgaaaagggaaatatcatcaggtaaatactagaaaaaagttttctggaaaaagttttgtgatttgtgcattcatctcatacaattaaacctttcttttgattgagcaatttggaaacactgtttttttttagaatctgccaagggatattttggagtgctttgagtcctatggagaaaaagaaaatatcttcagataaatactagaaggaagatttctcagaaactgctttgtgatgtgtgcattcttctcacagagtttaacctcacttttcattgagcagtttggaaacactgtttctgtaaattctaaggagggatatatgggagcccattgatgcctatggtgaaaaaggaaatatcttcagacaaaaactaaaaagaagctttctgagaaactgctttgtcatgtgtggatttatgtcacagaggcaaacctttcttttgattgagcattttggacacactcttttgttagaatctgtgaagggatatttggatgtgcattgaggtctgtgttgaataagaaaatatcttcagttaaaaactagaaagaagctttctgagaatctgctttgtgatgagttcattcatctcacagagttaaatatttctattgtttgagcagttcagagaagggatatttgggagtgcattaaggtatatggtgaaaaaggaaataccttcagataaaaactgaaagaatctttctgagaaactgctttgtgatggatgcattcactttaaagaataaaaactgtctgttgattgagcagtttggaaacactgtttttgtataacctgcagaggtatattttggagcacatgtaggcctgtggagaaaaaggaaatatcttcagataaatactagaaagaagctttctcagagacccctttgtgacgtgtgcattcttcttacagagttaaacatttcttttgattgagcagtttggaaacactgtttttgtaggatatgcgacggtatatttgggagagtgttgaggcctatggtgaaaaatgaaatatcttcagataaaaactaaaaagaaactttcccagaatctgttttgtgttgcttgcattcttctcacagagttaaacctttcttttcattgagcagttatgacacactgtttttgtagactctgtggagggatatatgggagcacattgaggtttagggtgaagaaggaaatatcttcagagcaatactatataaagttttctgagaaacagctttgtgatctgtgaatttatctcacggagtttaacctttgtttttattgaggagtttggaaacactgttttggtagaatctgtgaaggaatattttgtatcgcattggggcctatggtgaaaaaggacacatcttcagataaaaaccagaaaaaagctttttgagatactgatttgtgatgtgtgcattcttctcacagagttaaacaggtattttgattgagcagtttagaaacccagtttttgtagaacctatgaagggatgtatgggagagcatagaggcctatggttgaaaagaaaataccttgagataaaaattagaaagaaattttcaaggaaactgctttgtgatgtgtgcattcacttcacagagttaaactttacttttgatggagctgtttgtaacactttttcttttttaaatctgagaagagatatttgggagcgttatgaggcatatggtgaaaaatgaaatatcttgaggtaaataatagaaagaagttttctgtgaaatggctttgtgatttgtgcattcatctcacataggcaaacctttgttttgagtgagccattcagaaacactgtttttttagaatctgcaagggaatatttgggagcacattgaggcctgtggtgaaaaaggaaatgtcttcagagaaaaactaaaaagaaactttctgagaaacttctttatgatgtgtgcattcttctctcaaagttaaatcttaatatgactgagcagtttggaaacatggtttttgtagtataaacaaagggatatatgagagtgctttgaggctcatggtgaaaaatgaaatgtcttcagagaaaacctaaaaagaatctttctgagaaactgttttgtgatgtgtgcactcagcacaaagagttaaacctttcttttgagtgagcagttaggaaacaatgtgttggtagaatctctgaagggatattttggagtgaatgtagacattgtgaaaaaagaaatatcttcagataaaaactggaatctttctgagaaactgcttggtgaccagtgcattcatctccccgagttaaacctttcttttgattgtgcagtctggaaacatggtttttctagtataagcaaagggatatatgtgttcactttgaggcccatggtgaaaaacaaaatattttcagagaaaatctgcaaagaacttttctgagaaactgctttgtgatctgtgcattcatctcacagagttaaaccttaatttgattgagtagtttggaaacactggttggcagaatctgtgatgggatatttggtagtgcattgaggcctattgtgaaataggaaatatcttaagaaaaaaattaaaggaagctttctgagaaatggctttgtgatgaatgcattcatctcacagaattaaaactttcctttgattgagcagtttggaaacactgtttatgtctaatctacaaaatgatatttgggaatgcattgagacctaggcaaatatctttagataaatactagaaagaagctttctctgaaaccactttgtgatgtgtggatatttctcacagagttaaacctctattttgattgtgcacttatttatttatttatttatttgaaacaaagtctcactctttcacccaggctggagtgcagtggtgtgatcttggcacactgcaagctctgcctcctgggttcacgccattctcttgcctcagcctcctgagtagctgggactacttgcacctgccacaaggccctgttaattttttgtatttttagtagaaatggggtatcactgtattagtcaggatggtctcgatttcctgaccttgtgatccacacgtctcagcctcccaaggtgctgggagtacaggcatgggccacgatgcctggccttgtgcagtttctaaacactgtttttgcaaaatttgtgaagggatatttgggagtgctctgaagcctatgaggaaatagtaaatatctttggaaaaaaaactaaaaagatactttctgtgagactgctttgtgttgagtgcattcatcacccagaattaaactctattaattgaacagtttggaaacactgttttttaagaatctgcaaagggatagttgggaccacattgaggcctatgtgaaaaaggaaatatcttcagataaatactagaaagaatctttctcagaaagccctttgtgatgtgtgtattcttctccaaaattaaacctttattttgattgagcagtttggaaacactgtttttgaagaatctgtgagggaatatttgtgagcgctttgaagcctatggtgaaaaaggaaatatcgtcagaaaattattggaaggaagctttctgggaaactgatttgagatgtgtgcattcatctcgcagagattagcctttcttttgattgagcagtttggagtcactgtttaggtagaatctgtgaagggatatttgggagcgcatagaggcctgaggtgataaaggaaatatcttcagacaaaattagaaaggagtattctcagaaaccgctttgtgatgtgtgcattcttttcacagagttaaacctttcttttgattgggcagtctggaaacacggtttttgtagtataaacaaagggatatatgggagcactttgaagcccatggtgaaaaatgaaataacttcagagaaaaactacaaagaagttttctgagaaactgctttgtttaactctcacagagttgaacttaatttgattgcgtagtttggaaacactgttttggcagaatctgcagtgggatatttgggaggacattgcgacttattgtgaaataggaaatatcatcagaaaaaaatgaaaaaaaagctttctgagaaactgctttgtgattagtgcattcatctcacagaattaaatctttctttcgattgagcagtttggaaacaatgttcatgtagaatctgcaaagggatatttgggaaaacgttcaggcctagggaaatagcttcatataaatactagaaagaagctttctcagaaactgatttgtgatgtgtggattcttctcacagagttaaaactgtcctttgattgtccagtttttaacccctgtttttgaagaatctgcaaagggatatttgggagccctttgaggcctatagtgaaaaaggaaatatcttcagataaaaactggaaagattctttctgagaaacagctttgtgatgtgtgcattcgtcacacagtggtaaacctttcctttgattgagctgtttcaatacactgttcttgtagaatctatgaaaggatatttgggagcactttgtggcctaaggtgaaatagtaaatatattcagaaaaaaacaaaaggaagcttcctgagaaactgctttgtgatgaggacattcatctcacagaaataaacctttctattgattgagcagtttggaaacactgtttttttagaatcagcaaagggatatttgtgagcacattgagggcatggtgaaaaaggaaaatctacagataaatactactaggaagttttctgcattcatctcacagaattaaacttctttttgattgaggagtttggaaacactgtttttgtagaatctgagtagggatatttgtgagcactttgtggcttatggtggaaaaggaaatatcttcagatgaatactagaaataagacttctgggaaactgctttgtgatgagtgcattcatctcacagagttaagcctttcttttgattaagcagtttggaatcaccgttttagtagaatctgctcaaggatatttgggagtgcattgggacctatggtgataaaggaaatatcttcagataaaaattagaaagaagctttcttggaaactggtttgtgatgtgtgccttcttctcacagagttaaacatttcttttgattgaacagtctggaaacatgtttttgcagcataaacaaagggatatatggcagcgctttcagtcccatggtgaaaagtgaaatatcttcagagaaaaactgcaaagaatctttctgagaaactgctttgtgaagtgtgcattcacctcacagagataaacttaatttcattgagcagtttggaaacactgttttggcagaatctgtgatggtgtacttgggagggcattgaggcctattgtgaaataggacatatcttcagataaaatctaaaaagaagccttctgagaactgctttgtgaggactgttttgtgaggactgcattcatctcacagaaataaaccattcttttgattgagcagtttggaaacactgtttacatagaatctacaaagggatatgtgggaatgcagcgatgattagggaaatatcttcatataaatactagaaagaagctttctcagaaactgctctgtgatgtgtgtattcttctaacagagttaaacctctctattaattgtacagtttcaaacactctttttgaagaatctgccaaggggtatttgggagcactttgaggcctttagtgaaaaatgaaatatcttcatataacaactagaaagaagctttctgagaaacagcttagtaatgtgtgtattcatcacacagtggtaaacttttcctttgattgagctgtttggaaacactgtttttgtagaatctgcaaaaggttattttggagtgcttttatgcctatggtgaaatagtaaatatattcagaaaaaaactgaaatgaagctttctgagaaaccgctttgtgatgagtgcattcatctcacagaaataaacctttctattgattgagcagtttggaaacactgtttttatagaatctgctaaggtatatttgggaggtcattgaggcctatggcgaaaaaggaaatatcttcagataaatactagaaagaagctttctcagaaactcctttgtgatgtgtgcattcttctcgtggaattaaacctttctttagattgagccgttttgcaacactgtttttttagtatctgacaaggaatatttgggagggctttgaagcctacgttgaaaaggaaatatcttcagataaaaactatatagaagctttctgggaaactgctttgtgatttctgcattcatctcagagagttaaacctttcttttaattgagcagtttgtaaacactgtttttttagaatttacaaagggacatttggaagctctttgaggcctatggtcaaaaaggaaatatgttcagataaaaagtagaaagaagctttctggaaacttctttctgatgtgtacattcttttcaaagaggtgaaccattattttgattgagaactctggaaacactgtttttggaaaatctgcgaatggatatttgggagtgtattgaggcctacagtgaaaaaggaaatatcttcagataaaaaatagaagaacttttctcagaaactgctttgtgatgtgtgcattcttctcacagaggtaaacctttattttgattgagcaatttgaatacactgtttttgtggaatctacgaagtgatatacagagtgcaatggggcctatggtgcaaaaggaaatatcctcggagaaaaactagaaagaagcattatcagaaattgcttttggatatgtgcattcatctcacagagttaaacctttcttttgattgagaagtttggaaactttgtttttgtagaatctgcaaagggatatttgggagtgcattgaggcctatggtagaaaggaaacatcttcagattaaaactagtgagaatcattttaagaaactgcttggtgatgagtgcattcatctcacatagttaaacctttcttttgattgggaagtttgaaaagacagtttttgcagaatcagcgaagggatatttgggagcacttagaggcctatggtgaaaaaggaaatatcttcagataaaaactacaaagaagctgtgtcagaaagcactttgtgtggtgtgaattcttctcacagagtttaacctcagtttgattgagcagtttggaaacactgtttctttaaattctaccaagggatatatggaagtgcattgaggcttatggtgaaaaaggaaatatcttcagggaaaaactagaaagaatatttatgagaaaccgctttgtgatgtttgcattcatctcatggttttaaaactttcttttgattgagtagtttggcaacactgtttttgtaccatctgtgaagggatatttgggagtgctttgaagcctatggtgaaaaaggaagtattttcagggaaaaagtagaaagaagctttctgggaaactgcttttgatgtttgcattcaggtcaaagaattaaaactttctattgacttagcagttttgggacactgtttttgtataatctgcagagttatatttaggagcacatggatgcctatggtgaaaaaagaaatatcctcagatttcctttgtcctgattgagcagtttggaaccactgtttttgtagaatctgtgaagggatatttgggatacattcaggcttatggtgaaaaatgtaatatcctcagataaaaactagaaagatttctgagaaagctttgtgatgtgtgttttcatctcacagttaaacctttctttgattgagcagtttcaaacaactgtttttgtaggatttgggaaaggatgtttgggaacacattgaggcctatggtcaaaaaggaaatactttcagaaaaaaaccagaacaaatcttttggggaaactgctttgtgatgtgtagattcatgtcacagttgcactattcttttgatgaggcagtttggaaacactgtttttgtagaatctgcgaagggatatatgggagcgcattgaggcatatggtgaaaaaagaaatatcttcatgtcaaaactagaaagacactttctgcagaactgctttgtaatgtgtgcatttgtctcacagagataacgctttcttttgattgagtagtttggaaacactgtttttatagaatctgcaaaaggttatttaggaatgcattgaggactatggtgaaaaaggaaatatcctcagatataaactagaaaactttctgattaacagctttatgatgtgtccattcatctcacagaattaaaattttctattgatgtagcattttggaaacactgtttttgtagaatctgcgaagggatatatgggagtacattgaggcctctggtaaaaaagaaactatcttcagataaaaacttaaaagaagctttcagattaactgctttgtgatgtgttcattcatctcacagtgttaaactttcttttaattgagcatcttggaaacactgtttttgtagaatctgcaaagtgatatttaggagcacattgagtcctatggagaaaaaggaaatatcctcagataaaaaagagaaaggagatttctgagaaactgctttgtgatgtctgcttccgtctcatagaatttaagcattcttttgattaagtagtttggaaacacagtttttgcagaatctgtgaaaggatatttgggaatgcatgggacgtatggtaagagaggatatatcctcacataaaaaccagaaagatgttttctgaggaactattttgtaatgtgtacattcttctcacagagttacaactttcttttggttgagcagttaggaaacactatttttgtagaatctgcgaagggatatttgggagtgcattgaagcctatggtgaaaaaggaaatatattcacataaaaactagaaagacattttctgagaaactgctttgtgatgtgtgcattggtctcacaaagataaggctttctatttatttagcagtttggaaacactgtttttgtagaatctgtgaaaggatacatgggaacgcaatctggcctatgttgaaaaaggaaatactctcagacaaaatcttgaaagaagttttctgattaactgctttgtgaagtgtccattcatcttacagagttaaactttatttccattgagcatcttggaaacacaattttgtagaatctgcaaagggataatttgtagcacattgtggcctatggtgaataaggaaataccttcacataaaaactagaaagaggctttctggaaattgctttgtgatgtctgcatttgtctcagagagtttaagcattcttttgattaagaagtttggaaaacagttttggtagaatctgggaaaggatatttgggagcacattggggcctatggtgagaaaggaaatatcctcagaagaaaaccagaaagatgctctctgaggaactgttttgtgatgtgtacattcatctcacagagttacgattttcttttgattgagcagtttggaaacactatttttgtagaatctgcaaacggatattttggaatgcaatgaggcctatggtgaaaaaggaaatatcttcacataaataatagaaataagctttctgagaaactgctttgtgatgtgtgcattcatctcacagagttacaattttcttttgattgagcattgttgtgggaagtcagcaaccacaaatggagggaccggctaaaggcatggtagaagaacataaattttgaagatttcatggacatttattagttccccaaattaatacttttatattttcttatgcctgtctttactgcaatctctggacataaattgtgaagatctcatgtacatttatcacatccccaatcaatgcccttgtgatttcctatgcctgtctttaatctcttaatcccatcatcttcgtaagctaaggaggatgtatgtcgcctcaggacccatgatgattgtgttaactgcacaaattgtttgtagagcttgtgtgtttgaacaatacgaaatctgggcaccttgaaaaaagaagatgataactgcaggttcagggagcaagagagataaccttaaacactgaccaccagtaagtctggcagaacttacttctcttctttcaaaagcaaatggaagaaatatcgccgaattctttttctcagcaaggaacacccctgagaaagagaatgcttccctgagggtaggcctctgaaatggctgctttgtgggtggccatcttttatggttgcagctgcaggggtgaaataagcccccgtctcctgcagccctcccaggcttattaggatgaggaaattcctgcctaataaattttgatcagaccagttgtctgatcaaaccctgtctcaaaccctgtctcctgataagatgttatcaatgacagtgtgtgcctgaaacttctttagcaattgtaattttgccccggtcctgtggttctgtgatcccgccctgcctccatttaccttgtgatatctcattatcttgtgaagcatgtgatctctgtgaaccacaccctattctacactacctacccttctgaaaatcactaatgaaaacttgctggttttatggctcagggggcatcatggaatgtgccgacatgtgatgcctcccctggacactcagctttaaaatttctctctgttgtattttatccctttatttctcagaccagatgacactaagggaaaataaaaaagaacctactagaaatgtcgggggtaaatttcacccgatatttggctgagtttctcctgataaagcatcttggaaacactgtttttgttgaatctgtgaagggatatttcggagcacgttgaggcctatggtgaaaaaggaaatatcttcacatacaaactagaaagaagctttctgagaaagtgctttctgatgtgtgcattcacctgacagttaatcctttcttttgattgagcagtttggaaagactgtgtttgtagaatctgcgatgggagatttggaagcatattgaagcctatagtgataaaggaaatatcttcagacaaaaactagaaagaagctttctgaaaaactgctttgtgatgtgtgcattcatctcacagagttaaacctttcttttggttgagcagtttggaaacactgttttggaaaaatttgcgaagagatatttgggaatgcattgaagcatatggtggaaaaggaaataaccttagataaaaagtaaaaagacctctgagaaacagcttcatgatgattggattcatctcacagtgttaaaactttcttttgatagagcagtttggaatcattgtttttgtagaatctgtgaagggatatttgggagtgcattgaggcctatggagaaaaagcaaatatcttcagataaaaaatagaaagaatttttccaagacactgttttggatgtgtgcattcccctcacagagctaaaggattctcttcattgaggagtatggaaatactgtttttgtagaaactgtgaaggaatatttgggaccactttgaggcctatggtgaaacaggaaatgccttagggtaaaagctagaaagaagctttctgagaagctgctgtgtgatatctacattcatctcacagagataaagcctacttttgatttagcagttttgaaacactgtgtagaatctgcaaaaggatgttttggagtgcattgaggactgtggtgaaaaaggaaatatcttcataaaaacctgaaagaagcttttggagaaactgctttgtgatgtgtgctttcatcacatagagttaaacaaatattttgatggagcactttggtaacactgtttttgtagaatctaggaagttatatttgggagcactttgaggtctgcagtgaaaaaggaaatattctcagatgaaaactagaaagaagctttctgagaaaatgctttgggatgtgcgcattcatctcacagaatttcacctttctgacatttgagcagttaggaaacactgtttttgtagaatctgtgatgggatattttggagtgcattgagacctactgtgaaaaaggaaacacctttacataaaaactagaaggatactttctcagaaacaaatttgtgttgtgtgcatttgttttactgagataaaactttcttttgattctgcagtttagaaacactgtttttgtagcatctgcaaaagcatacttgggaacgcaatgaggcctatagagaaaaaggaaatatcctcagataaaaaccagaaagatgctttctcaggaactgttttgtgatgtgtacattcatctcacaaagttacagctttcttttgattgagcagtttggaaacactatttttcttgaatctgcaaagggctatttgagaacgcaatgaggcctatggtgaaaaaagaaatatattcacatgaaaactagaatgatttctgagaaacagcttcgtgatgtgtgttttcatctcacagagttaatactttcttttgattgagaagtttggaaactgtttttctagaatctgcaaaggaatattagggagcacatggaggcctatggtgaaaaagacaatatcttctgatgaaaactagtaagaagctgtctgagacattgctttgtgatgtgtacattcacctcacacagagttaaaactttcttttcattgagcagtttggataaactctttttgtagaatctgcaaagggatatttggtagcaaattgaggcctagggtgaaaaaggaaatatcttcacacagaactagaaagacactttctgagaaactgctttgttatgtgtgcattcatggaatattttcacataaaaactagaaagaagctttctcagaaacagctttgtgatgtgtgaattcatcccacagagttaaatatttattttgattgaccagtttggaaacactggtttttagtgtctgtgagggatatttgggagagcatggagacctatggtaaaaaaaaaatcttcagatgcaaactagaaaggagttctctgagaaactgctttgtgatatgtgcattcatctcacagcattaaacatttgttttcattgagcagtttggaaacacagtttttgtagaatctgtgactgctttcatctcatagagttaaaactttcttttgatggatctgtttggaaacaatgtttttgtagaatctgcaaagggatatttgtgagtgtgatgatacctgtggtgaaaataaataaaatatcttcagacaaaaactacaagggagatttttgagaaactgctttgtgttgtgtgcatccatctcacagagtaaaacatttattttgatcgagcagtttggaaacactgtttttgtataatctgtgaagtgatgttaagtatcagaaaaaggcctatggtgaacaaggaaatatctttagataagaatggaaagaagtgttatgataaactgctttctgttgtgtgcattaatgtcactaagataagtccttctttttatgaaacagttcagaaacactgtttttgtataatctgcaaagggatatttgggagcacattgagccctatggcggaaaaggaaacatccccagagaagacctatacagaagctttctgagaaactgctttgtaatgtgtgcattcatctcacagaattaagcctttcttttgactgagccatttggaaacactgcttttgtttaatctgcaaaatgatattaggcagtgcaaaaagccaatggtgaacaaggaaatatcttcagaaaaaacctggaaagaagcattatgagaaactgctctctgatgtgtgcattcatctcacagaggtaagtctttcttttgatggaacagtttggaaacaccttttttttaaaatctgcaaagggatatttggaagtgcattgaggcctgtggtggaaaaggaaatatcctcagagaagacctatatggaaactttctgagaaactgctttgttatgtgtgcattcatctcacagagttaaatctttcttttgactgaggcgtttggaaacaccatttttgtagaaactgcgaaggcatatttcaaagcgcagtgatgcctatggtgaaaaaggaaatatcttcagataaaaactagaaagaaccttttttagaaactgctttgtgatgtatgaattcatttcacagagttaaacttttcttttgactgagcagtttggaaacactgtttttgtttaatctgcaaagtgttgtttggtagtgcaaataggcctattgtgaacaaggaaataccttcagataaaaactagaaagaagcgttatgagaaactgctttctgatgtgtgcattcatctctcagagttaaatccttcttttgatggaagagttcagaaacactgtttttatagagtctatgaagggatatttgggtgcatattgaggcctatggtggaaaagaaaatgtcttcagaaaagaactaggcagaagctatctgaaaaactgctttgtgatctgtgttttcacctcacagagttaaacgtttcttttgattgagtagtttagaaacactgtatttgtagaatctgcaaaggtatatttgggagcgcacagagacctatggtgaaaaacaaaatgtagtaggaaaaaaatagaaagaagcattttgagaaattgctctgtgatgtgtgtattcaactcacagaggtaaacttattttttcattaagcagtttgaaaacactgtttttgtagaatctgtgatgggatatttgtgagtgcattgtgcctatagtgttaaaggaaatatcttcggataaaaactagaaataagctttttgagaaactgctttctgatgtgtgcattcatcccccagagttaaaagtttcttttgactgagcagtttggaaacactctttttgcgctatcaacaaagtgatattaggtaacgcaaaaaaggctatggtgaagaaggaaatatcttcagataaaaatgggaaagaagctttatgagaaactgctttctgatgtgtgagttcaactcacagtgttaatcttgttttattgagcagttttgaaacactctttttgtaggatcagtgaagggatatttgggagtgcatcgaggcctatggtggaaaaggaaatatcttctgagaagaactacacagaagctatctgagaaactgttcgtgaagtgttcattcatctcacagagttaaattttcttttgattgagcagtttggaagtaaggtttttatagcatctgccaagagatatatgggagtgcaatgaagcctatgggatgaaggaaatatctttggacaaaaacaagaaagaagctttttgagaaactgctttgtgatgtgcacatttatctcacagacttagacatttcttttgattgatcagtttggaaacactgcttttgtagactctgcaaagggatatttgggagtgcatgaggcctatggtgaaaaaggaaataacttcagataaaaactacaaagaagctttctaagaaaaagctttgtgatgtgggcattcttctcacagtgttaaatgtttcttttgattgaggagtttggaaacactgtttttgtagaatctgcaaagggatatttgggagcacactgatgcatatgttgaaaaagcaaatatcttcctataaaagctagaaaaatcttcttgagaaactgctttgtgatgtatgcattcatctcaccgagttaaacttttcttttgactgagcagtttggaaacactgttgttgtagaatctgcgaagggatatttgggaatggattgtaacctattgtggaaaaggaaacatcttccaataaaaattagaaagaaggtttctgagaaactgcttcatggtgtgttcactcacctcactgagttaagccttctttttgattgagaagtttggaaacactgtttttgtagaatctgggaggggatactttgagcacagggataaatttgagtgctttgtggcctatgttgaaaaagaaatatcttcagataaaaactagagagaagatttctgagaaactgctttgtgatgtgtgcattcttctcacacagttaaacatttcttttcattgagcagattggaaacactctttttgtagaatctgcaaaggtatatttgggagcatattgaggcctatgttggaaaaggaaatatcttcagagaagaactagacagaacctatctgagaaacagttttatgatgtgtgcattcatcagagttaaacctttcttttgattgaacagtttggaaacaccgtttttgcggaatcagcaaaggtacatttgtgactgcactgaggcctatggtgaaaaaggaaatatctacagataaatagtagaaataagttttctgagaaactactttgtcatgtgtgcattcaacccacagaattaaacttgtttttcaattaagcagtttgcaaacactgtttatatagaagatgcgatgggatatttgggaatgctttgaagcctatggtgataaagtaaatatcttcagttagaaactataaagaagttttttgagaaactgctttgtgatgtgtccattaatctcacagggttaaacttttattttgaatgaggaacttggaaactctgtttttgcaaaatctgccaagcattattatgtggcacaaaatagcctatggtgaacaaggaaatatcttcagataaaagctggacagaagggttgggagaaactcctttctaatgtgtgcattcatctcacagagttaagtcattcttttgatggaacagtttgaaaacactgtttttgtagaatctgtgaagagatatttgggagcgcattgaggcctatggtggaagaggaaatatcttcagagaagaattaggaagaagctttctgagaaaatgctttgtgttgtgtgcatgtgcagtcatctcacagagttaaacctttcttttgactgagcagattggaaacactgtttttgtagtacctgcaaagggatgtttgggagctcattgaagccaatggtgaaaaaggaaatacctttggataaagactagaaggaagctttttgagaaacggctttgtgatgtgtgcattcatcttacagagttaaacctttcttttgactgagcagtttggaaaccctctttttgtatattctgcgaagtgaggttttgtagagcaaaactgcctattgtaaacaaggtaatatcttcagataaaaactggaaagaagcgttacaagaaactgctttctgatgtgtgcattcatctcacagagtgaactccattttttgatggaacagtttggaaacactctttttttagaatctgcaaatggatatttgggagtgcattgaggcctgtggtggaaaaggaaatatcttcagggaagaactagacagaagctatctgagaaactgctttgtgatgtgtgcattcatctcacagagttaaaactttcttttattgtgcagtttggaaacactgtttttgtattatctgcgaagggatatttgggagtgcattgaagcccactgttaaaaaggaaatatcttctgataaaaactagaaagaagctttttgagaaactgctttctaatgtgtactttcaactcacagagttaaaactgtttttgtttgagcagtttggacacaaggtttttgtagaatctgcaacgggatatttgggagtgcattgaagcctatggtgaagaaaaaaatatcttcagataaaaattagaaagaagctttttgagaaacttatgtgacttgtgcattcatctcacaacgataaacctttcttttgactaagcagtttggaaacaacgtttttgaaaaatctgccaagcaatattaggcaccattaaaaagactatagtgaacaaggaaatatcttcagataaaaactggaaagaagcgttatgagaaacagctttgtgttgtgcatgttcatgtgatgcagctaactccttctttatgtggaagagtttggaaacactggttttgtagaatctgcaaagggatatttgggagcatattgaggcctatggtggaaaaggaaatatcttcagagaagaaatagacataagttttctgagaaactgctttgtgatgtgtgcgttcatcttacagaattaaaactttctcttgattgagcagttttgaaacactatttctgtagaatctgtgaagggatatttgggagcacattgaagcctattttgaaaaaggaaatatctttggataaaaatgagaaggaagctttatgagaaactgctatatgatgtgtgcattcatcttacagatttaaacttttcttttgattgatcagtttggaaacactgtttaaagaggatctgcaaaggaatatttgggaatgcattgaagtatatggagacataggaaatatattcggataaaaactagaaagaagtaatttgagaaactgctttttgatgtacactctcatctcacagagttaaacctttcttttgattgatcagtttggaaacactgtttttgtagaatctgcaaagggatgcttgggagctcactgatgcctatggcataaagggaaatatcttcagaaaaaaactagaaagaacttgagaaactgttttctgatggatgcattcatcacacagagttaaactagtctttgactgagcagtttgggaacacggttttacaatcaattgcgaagcaatgttaggtagcgcataaaaggattatggtgaacaagaataatttcagagaaaaactggaaagaatcgttaaaagaaactgccttgtgatgtgcgcattcatctcacagttttaagtctttcttttgattgaacaatttggaaacactgtttctgtagattctgtgaagggatatttcagagtgcattgtggcctatggtggcaaaggaaatatcttcagagaagaactagacagaaactacctgagaaactgctttgtgatgtgtgcattcatctcacagagttaaactttttttttctttttgagcactttggaaacactctttttgtagaatctgtaaagggatatttgagagtacactgatgcctatagtgtaaaaggaaatatctttggataaaaactagaaagaagctttttgaggaactgctttttgatgtatgcattcatctcaaaaagctaaacttctcttttgacagagcagtttggaaacactgcttttgtataatctgtgaagtgatgctaggtagcataaaatagcttatggtgaacaagtaaataccttcagataaaaactggaaagaagcgttatgggaaactgctttctgatgtgtgctttcatctcacagagttcaatccttaatttaatggaacagttcggaaacacttttttttttcagagcacattgaggcctatgttggaaaaggaaatatcatcagagaagaactagacaagctatctgagaaacagctttgtgatgtgtgccttcatctcgcagagttaaacctctattttgattgagccttttggaaactgtttttgtataatatgcaaaggtatatttgggagctcgctgaagcctatggtgaaaaaggaaatatcttcagataaaaactaggaagaagctttttgagaaactgctttgtgatgtatgagttcaactcacagagttaagcttgttttctgatagagcagtttggaaacagtgtttttgtagaatctgtgaagggatatttaggagcacattgaagcctatgttgacataggaaatatctttggataaaaactagaaagaagctttttgagaaactgttttgtgaattgtgcatttgactcacagagatcaaactttcttttactgagcagtttggaaacactgttttatcaaaatctgtgaagcaatatcaggtagtgtaaaaaagcctatggtgaacaagaagacgtcttcagatgaaaactggaaagaagcgttacaagaaactgctttctgatgtgtgacctcatctcacagagttaagtccttcttttgatggaacagtttggaaactctgtatttgtagaatatgtgaagggatatttgggatcaaatttaagcctatggtgaaaaaggaaatgtcttcagttaaaaattggaaagcagtgttataaaaactggtttctcatgggtgcattcatctaacagagttaagtccttcttttgatggaataatttggaaacactgtttttgtagaatctgcaaaggggtatttgggagcatattgaggtctatggtggaaaaggaaatatcttctgagaagagctagacagaagctttctcagaaaatactttgtgatgtgtgaattcatctcatagagttaaaacttttttttgattaagcagtttggaaacactgtttttgcagaatctacgaagggatttttgggagcacattgaagcctatggtgaaaagggaaacatcttcaaataaaaactggaaagaagctttttcagaaactgttttgtgatgtgtgcattcatctcacagagataaaactttctttattttatcagtttggaaacactgtttttgtagtaactgcaaaaacgaatttgggagcccaagaggcctaaggtgaaaaaggaaataacttaagatgaaaactagaaagaagctttttgagaaaacagtttgtgatgtgtgcattattctcagagttaaacgtttcttttgactgagcagtttggaaacactgtttttgtagaatatgagaagggatgtttgggagtgcactgaggactatggtgaagaagaaaatatcttcggataaaaactagaaaaaagatatttgagaaactgctttgtgatgtttgcattcaactgacagaattaaaacttttttttgattgatctatttggagacacagtttttgtagaatctgtggagtgatattttgaagaatctgtgaagggatatttgggagcacatagagaagcctatggtgataaaaaatatctttggacataaactggaaagttttttgagaaacttgtttgtgatgtgtgcattcgtttcccatagttaaacaattcttttgactgagcagtttggaaacactgtttttgtgaaatctgtgaatcaatatttggtagcacaagaaagcctatgatgaaaagggaaatatctttaggcaaatatccagaaagaagcacaatgggaaactgctttctgatgtgtgcattcgtctcaaagagttaaatccttcttttgatggaagatttcagaaacactgtttatatagaatctatgagggaatatttgggagtgcattgaggcctgtggtggaaacggaaatatcttcagagaataacaagacagaagctttctgagaaactactttgtgatgtatgcattcaattcacagagttaaacctgttttttcattgagcagtttggaaacactgtttttttagaatctgtgatgggatatttgggaatgcattgaagcctatggtgatgaaggaaatatcatcagataaaaacgagaaagaagctttttgagaaacttctttttgatgtatgcatttgtctcacagagttaaacttttcttttgattgggcagtttggaaacactgtttttttagaatctgtgaaaggatgttaggtatcacaaaaaggccaatggtgaagaaggaaatatcttcagataaaaactggaaagaagcattatgagaaaatgctttctgctatgtgcattcatctcacagatttaaatccttctttcacaaggacagttaggaaacactgtgtttgtagaatctgcaaagggatattttgaagtgcagtgaggcctaatgtggaaaagaaagtatcttcagagacgaattagacagaagttatctcagaaactactttgtgatgtatgatttcctctcacagagttaaacttttcttttgattgatcagtttggaaacactgtttttgtagaatctgtgaagctatatttgggagcaccttcaaacctatggtgataaatcaaatatcttcggataaacactagaaaaaagttattgagaaattgctttgtgatgtgagcattcatcttgcagctttaaacatttcttttgactgagcagtttggaaacaccttttttgcaaaatctgtgaagtgaatttaggtagtgcagaaaagcctatggagaaaaagaaagtatcttcagataaaaagtgaaaagaaacgttatgagaaactgctttctgatgtgtaggataatctcaaagagttaaacttttcttttgattcagcagtttggaaacatggtttttgtagaatctgtgaagggatatttggcagcacatgggaacatatggtgaaaaaggaaatatctttggataataatgagaaagaagtttttgagaaactgacttgtgatatatacaatcatctaacagagttaaacttttctttgattgatcagtttggagacactatttttgtagaatatgcgatgtgacattggagagtgcatgaggcctatgttgaaaaaggaaataacttcagataaaaaccagaaagaagctttctgagaaactgcttagtgatgtgtgcattctcctcacagagttaaacgtttcttttattgagcagtttggaaacactgtttttgtagaatgtgcaaagggatatttgggagcacactgatgcctatggtgaaaaaggaaacatctttggataaaaactagacagaaggtttttgagaaacttctttgagatttgtgcatttagctcacagagttaaacttttctatagactgagcagtttggaaccactgtgtttgtgtaatctgtgaagcgatgtttggtagctcaaaaacacctatggtgaacaaggaaatatcttcagataaaaactggaaaaaaacatgataagaaagtgctttcttatgtatgcattcatctcacagagttatatccttcttttgatggaacagtttagaaacaatgttttttatagaatctgcaaagggttatttaggagtgtactgtgttctgtggtggaaaaggaaatatctttggagaagaactagaaagacgctttttgagaaactgctttgtgatatgtgcattcacctcacagcggtaaacttgtttttgattgagcagtttcaaaactctgtttttgtagaatctgcaaatggatatttgggagcacattgaggcctaaggtgataaacgaaatatcttaggataaaaactagaaagaagctttctaagaaactgatttgggatgtggactttcatctcacagatttaaacctttcttttaactgagcagtttggaaacgctgtttttgcaaaatttgtgaagtgatattaggtagtgcaaaaaagcctttggtgaaaaaggaaataaattcaaataaaaactggaaagaagcattaggagaaactgctttctgatgtgtgcattcagctcacagagttaagttctttttttgatggaatagtttggaaacgttgtttttgtagaatatatgaagggatatttgggagcactttgaggcctctggtgtaaaaggaaaaatcttcagagaagaactagacagaagctatctgagaaactgctttgtgatatgtgcattcatctaacaaagttaaaccattcttttgattgagcagttcggaaacactgtttttgtagaatctgcgacaggatatttgggagagcatggaagcctatggtgatcaaggaaatatgttcatataaaaacgagaaagaaacattttgagaaactgctgtgtgatgtgtgcattcatctcacagatttaaacctttcttttgattgagcagtttggaaacactgtttttacgaaatctgcaaagggatatttgggagcacactgatgcctatggtggaaaaggaaatatctttgtataaaaactagaaactttttgagaaactgctttgtgatgtatgtattcatctcacagaggtaaacttttcttttgaatgagcagtttgaaaacactggttttgtagaatctgcaaagagatagtggagtgcattgaggcctgtggtggaaaaggaaatatcttcagagaagaactagaaagaagctttctgagaaactgcttcatgatgtgtgcattcatctcacagagctaaagtttcttttggctgagcagtttggaaacactgtttctgaaaaatctgcaaagggatatttgggagcacactgatgcctattgtggaaaatgaaatatctttgtacaaaaactagaaagaaactttttgagaaactgctttgtgatgtatgtattcatctcacagaggtaaacttttcttttgactgagcagtttggaaacattgtttttctataatctgcaaagggatatttgggagcacattgaggcctgtggtggaaaaggaaatatcttcatagaagaactagacagaagctttctgagaaactgctttgtgatgtgtgcattcatctcacagagctaaagctttcttttgatggagcagtttggaaacaatgtttttgcaaaatctgcaaagggatattagggagcacactgaagcctatggtgaaaaatgaaatatctttggataaaaactagaaagaaactttttgagaaactgctttgtgatgtatgtattcttctcacagaggtaaacttttcttttgactgagcagtttggaaacactgtttttctataatctgcaaagggatatttgggagcacattgaggcctatggtggaaaaggaaatatcttcagagaagaactagacagaagctttctgagaaactgctttgtgatgtgtgcattcatctcacagagctaaagctttcttttgattgagcagtttggaaacactgtttttgtagaatctgtgaagggatatttgggaggtaattgaagcctgtggtgaaaaaggaaatatcttcagataaaaagtaaaaagaagctctttgagaaactgctttgtgattatcaggtgaaattcacccctgatatgtcacgtaggttcttttctattttccctaaatgtcagcccatctgagaaataaagggacggagtgcaagagagaaatttgaaagcttggtgtccggggtagacatcacattgctgcaggttctgtgatgggccacaagccacaaagccagcaagtttttactagtgattttcaaaaggggaaggagtatacggtagggtgtggatcacagagatctcaggcttcacaaagtaataagatatcacaaggtaaaaggaggtggggcaagattacaggacacaggactggagtgaatttaaaattgctaatgaagtttctggcttgcattgtcattgatatcatcttatcataaacagggtttgagagcagaaaactggtctgaccaaaatttattaggcgggaattttctcctcctaataagcctgggagagctacaggagactggggctcatttcatctctacagctgtgaccataaaagacagccacccccaaagcagccatttcagatgcctaccctcagggatgcattatctttctctgggatgtttcttgctgagaaaaagaattcagagatacttctcccatttgctttgaaagaagagaaatatggctctgttccaccaggctcaccaggagtctgagtttaaggttatctatcttcttccctgaacattgctgccaccctgttctttttccaaggtacccagatttcatagtgttcaaacacacatgctctacacacaatttgtgcagctaatgcaatcatcacaggatcctgaggtgacatatatcctcctcactctctagtgagatgaacccagtaccacagatggaaatgcagaaatcacctgtcttctgcgtcgctcatgctgggagctgtagaccagagctgttcctatttggccatcttggctcctcccctgaacctttcttttgattcagctgtttggaaacactctttttgtagattccacaagtggatatttggagcgctttgaggcctattgtggaaaaggaaatatcttcacataaaaactacatggaacatcctgagaaactgctttgtgatgtgtgcattcatctcacagagttgaaaatttcttttcattgagcagttttgaaacactttttctgtagaatctgcaaggggatatttggtgccattttaggcctattgtggataaggaaacatcttcacataaaaactgcacagatgcattctgagaaacttctttgtgatgtgtgcattaatgtcttagagttgaagctttcttttcattgagcagtttggaaacactctttttgaaggatctgcaagtggatatttggaacgctttgaggcctatggtggaaaaggaaatatcttcacataaaaactacactgaagcattctgagaaacttctttgtgtcgagtgcattcaactcacagagttggaactatattttgatagagcagttttgaaactctctttttgtagaatctgtacgtgggtatgtggagttgtttgtggctaatggtggaaaaggaaatatcttctcataaaaactacacagaagctttctgagaaacttctttgtgatgtgtgcattcatctcacagggttgaaactttcttttgattgagctgttttgaaacactctttttgtagaatatgcaggtggatatttggagcactttgaggcatattgtggaaaaggaaatatcttcacatacaaagtacgtggaagtattctgagaaacttctttgtgatgtgtgccttcatctcacagagttgaacatttctctgagctgtttggaaacactctttttgaagaatgtgcaagtggacatttggatcactttgaggcctatggtggaaaaggaaatatcttaaaataaaaattacaaagaagtgttctgtgaaacttctttatgatgtgtgcattaaactcacagtgttgaacctatcttttgagtgagcagtttggaaacactctttttgtagaatctgcaagtggatatttggagcgctttggggtctattgtggaaaaggaaatatcttcacataaaaactgcacagaagcattctgagaaactgctttgtgatgtgtgcattaatctcacagagttgaacatttcctttgatggagcagttttgaaacactctttttgtagaatctgtaaggggatatttggagtgcttttaggcctaatgtgtataaggaaatatcttcacataaaagatacacacatgctttttgagaaacttctttgtgatgtgtgcattagtctcacagagttgaggctttcttttgattgagcagtttggaaacactctttttgtgggatctgcaagtggatatttggaacactttgaggcctatgatggaaaaggaaatatcttcacataaaaactacacagaagcattctgagaaactactttgtgatgtgtgcattcaactcacagagttgaacctatcttttgatggagcagttttgaaactctctttttgtagaatctgcaagtgggtatttggagcctttctggccaaaggtggaaaaggaaatatgttcacataaaaactacacagaagccctctgagaaacttctttgtgatgtgtgaattcatctgccagagttgaccctttctgttgaatgagctgttatgaaccactttttttttgtagaatatgcaggtggatatttggaacattttgaggcctaaggtggtaaaggaaatatatacaaataaaaactatacagaagaattctgagaatcttctttttgatgtgtgcattcaattcacagggttgaacctatcttttgatggagcagttttgaaactcactttttgtacaatctgcaagtgaatatttgcagcactttgaggcctatggtggaaagagaaatatcttcacataaaaactacacagaagcattctgtgaaacttctttgtgatgtgtgcattcatctgacagagttgaacttttcttttgattgagcagtttggaagcactctttttgtagaatctgcaagtggatatttggagtcctttgaggcctattgtggaaaaaaaatcttcacataaaatctacacggaagcattctgagaaactgctttgtgatgtatgcattcatctcagagagttgagcattatttggatttagcagttttgaaacactccttttgtagtatctgcaagtggatatttggatctctttgaggactaagtttgaaatggaaatatctccacataaaaaccacacagaagcattatgagaaaataatttgcaatgtgtgcattcatctaacagagttgaacatttcttttgattgagcagttttgaaacactcttttagtagcaactgcaagtggatatttggagtgctttgaggactattgtggaaaaggaaatatcttcacataaaaactacacagaagcatcctgagaaagaactttgcaatgtgtgcattcatctcaaagtgttgaaacattcttttgattgagcagtttggaaaaactctttttgtaggatctgcatatggatatttggaacgttttgaggcataaggtggaaaaggaaatatcttcaaataaaaactacacagaagaattccgagaaacttctttgtgatatgtgcgttcatctcacagagttgaacccttgttttgattgagcagttttgaaacaatctctatgtagaatctgcaggtgtatatttggactgctctgaggcctgttgtggaaaaggaagtatcttcacataaaaactacatagaaatattctaagaaacttctttgtgttgtgtgcactcatctcacagagttcagtctttcttttgattgagctgttttgaaacactcttgttgtagaatgtacaggtggaaatttggatcgctctgaggtgtattgtggaaaaggaaatatcttcacataaaaactacatagaaacattttgagaaacttcttttcaatgtgtgcattcatcacacagagttgaatttcttttgattgagcagtttggaaacactctttttgaaggatatgcaagtggatatttggatcactttgaggcctatggtggaaaaggaaataacttcacataaaatctacacagaagcgttctgagaaactactttgtggtgtgtgcactcatctcacagagttgaacctttcttttgattgagcacttttgaacaccctttttgtagaatctgcaagtggatatttagaattctttgtggactattgtggaaaaggaaatatcttcacttaaaaactacacagaatactgagaaacttatttgtgatgtgtgcattcatctcaaagtattgaagatttcttttgattgagcagtttggaaaattctttttgaagaatctgaaagtggatatctggagccatttgaggcctaaggtggaaaaggaaatatcttcacacaaccactacacagaagcattctgggaaagttctttctgaagtgtgcattcatctcacaggtttgaacgtttcttttgattgtgtagttttgaaacactcttttctagaatctgcaggtggattttctgactgctttgaggcttattgtagaaaaggaaatatcttcatataaagactatacagaagcattctgataaacttctttgtgatgtgtgtgttcatctcacattgtttaacctttcttttgattgagcagttttgaaacacgtttttgcagattctgcaagtggatatttggagtgcattgaggcctattgtggaaaaggaaatattttcacacaaaaactacacagaagcattcagagaaacttctttgtgatgagtgcattcaactcacagagttgaaaatctcttttgattgaggaattttgaaactctctttttgtcgaatctgcaagtggatatttggagcactttgaggtctatggttgaaaaggaaatatcttcacataaaaactacacagaagaattctaatgaacttctatgtgatgtgttcattcaactcacagagttcaacctatctgttgatagagctgtttacgaactctctttttgtagaatataaaatggatattttgagtgctttgcagcctatagtggaaaaggaaatatcttcacataaaaattacacagaaacattctgagaaacatcttcgtgatgtatgcattgatctcacagagttgaacatttcctttaattcagcagttttgaaacactctttttgtagaatctacatgtggatatttggagagctgtgagggctattgagaaaaggaaatatcttcacataaaaactacacagaaggattctgagaaacctctttgcgatgtgtgcattcatctcacagaggtgaacatttcttttgatagagtaactttgaaacattcttttttgaataatctgcaagtagatatttggtgcgctttgagccctattgtggaaaaggaaatatcttcacacaaaaactacaaagaagcattcttagaaagtaattggtgatgcgtgcattcaactcacagaggtgaaactatcctttgattgagcagttttgaatctcactttttggaatatctgcaagtggatgtttggagcccttggtggcctatgatggaaaaggaaatatcttcacacaaaaactacacagaagtattctgataaatttctttgtgatgtgtgcattattctaacagagttgaaactttctttgagcagttttgagacaatctttttgtagaatctgcaggtggatatttggagtgctttgaggtctattgtggaaaaggaaatatcttcacataaaagctacacagaagcattctgagaaactcctttgtgaagtgtactttcacttcagagagctgaagctttcttttgattgtgcagttttgaaactctctttttgtagaatcagcaagtggatatttggagccatttgcagcctacggtggaaaacaaaatatctccacataaaaactacacaaaaaaatacagagaaagttctttgtgatgtgtgtattcatctaacagagttgaaagtttcttttgattgagcagtttggaaacactctttttgtagaatctgcaagtggatatttggagcgctttgaggcatattttggaaaaggaaatatcttcacataaaaactacccagaagctttctgagagccatctttgtgatgtgtgcattcatttcacagaattgaaccgttcttttgattgagcagttttgaaacactctttttgtagaatctgcaagtggatatttggagcaccttgcggcctatggtgcaaaaggaaatattttcacataaaaactacacagaagtattctgagaaacttctctgtgatgtgtgcattcatctcagagagttgatactttcttttgatttagcagtttgaaacactctttttgtagaatttgcaagtggatatttggagcgctttgtggcctattgtggaaagggaaaaattttcacataaaaagtgcacagaagcattctgaggaacttctttttgatctgtgcattcatctgaaagagttgaacctttcttttgattgagcagttttgaaacactctttttgtagaatctgcatggggatatatggagcactttgacctactgtggaaaaggaaatatcttcacataaaaactacacagaagcattctgagaaacatctttgggatgtgtacattcaactcacagagttaaacctaccttttgatagagcagaaactctctttttgtagaatctgcaagtggacttttggagcctttggggccaatggtggaaaaggaaatatcttcacataaaaactacacaaaatcattctgagaaacttctttgcaaagtgtgcattcatctcagggaattgaatgtttcttttgattgagcagtttgtaaacactctttttgtagaatctacaaatgtatatttggagcgctttgaggcctattgtggaaagggaaatatcttcacataaaaactacacagaattattctgagaagcttctttgtgatgtgtgcattcatctcacagagttgaaagtttcctttgattgagcagtttggaaacactgttttcgtagaacctgcaagtggatatttggagggccttgaggcgtattgtggaaaaggaaatatcttcacctaaaaactacacagaagcattctgagaaacttctttttgatgtgtgcattcatatcagagaggtgaaactttctttgattgagcagttttgaaactctctttttgtagaatctgcaagtggatatttggaacgctttgaggcatattgtaaaaggaaatatcttcacataaaaacaacaaaaaatcattctgggaggggaggagccaagatggccgaatagtaacagctctggtctacagctcccagcgtgagtgatgcagaagatgggtgatttctgcatttccatctgaggtaatgggttcatatcactagggagtgccagacagtgggtgcaggacagtgggtgcacacactgtgcgcaagccgaagcagggcgaggcattgcctcacttgggaagtgcaaggggtcagggagttccctttctgagtcaaagaaaggggtgacagaagaacctggaaaatcgggtcactcccacctgaatactgggcttttctgaccggtttaaaaaatggcacatcaggagattatatcctgcacctggcttggagggtcctatgcccacggagttttgttaattgctagcacagcagtctgagatcaaactgcaaggtggcagtgaggctgggggaggggcgcccaccattgcccaggcttgcttaggtaaacaaagcagctgggaagctcgaactgggtggagccctccacagctcaaggaggcctgcctgtctctgtaggctccacctctggggacagggaacagacaaacaaaaagacagcagtaacctcggcagacttaaatgtccctgtctgacagctttgaagagagcagtggttctcccaacacacagctgaagatatgagaatgggcagactgcctcctcaagtgggtccctgaccgctgacacccaagcagcctaactgggaggcactgcccagcaggggcacactgacacctcacatggcagggtattccagcagacctgaagctgagggtcctgtctgttaaaaggaaaactaacaaacagaaaggacatccacaccaaaacccatctgtacatcaccgtcatcaaagaccaaaagtagataaaaccacaaagatggggaaaaaacagaacagaaaaactggaaactctaaaaagcagagcgcctctcctcctccaaaggaatgcagttcctcaccagcaacggaacaaagctggatggagaatgactttgacgagttgagagaagaaggcttcagatgatcaaattactctgagctatgggaggacattcaaaccaaaggcaaagaagttgaaaactttgaaaaaaatttagaagaatgtataactagaataaccaatacagaggagtgcttaaaggagcagatggagctgaaaaccaaggcttgagaactatgtgaagaatgcagaagcctcaggagctgatgtgatcaactgcaagaagggtatcagcaatgaaagatgaaatgaatgaaatgaagcgagaagggaagtttagagaaaaaagaataaaaagaaatgagcaaagcctccaagaaatatgcgactatgtgaaaagaccaaatctacgtctgattggtgtacctgaaagtgacggggaggatggaaccaagttggaaaacactctgcaggatattatccaggagaacttctccaatctagcaaggcaggccaacgttcagattaaggaaatacagagaacgacacaaagatactcctcgagaagagcaactccaagacatataactgtcagattcaccaaagttgaaatgaaggaaaaaatgttaagggcagccagagagaaaggtggggctaccctcaaagggaagcccatcagactaacagtggatctctgggcagaaaccctacaagccagaagagagtgggggccaatattcaacattcttaaagaaaagaattttcaacccagaatttcatatccagccaaacgaagcttcgtgagtgaaggagaaataaaataatttacagacaagcaaatgctgagagattttgtcaccaccaggcctgccataaaagagctcctgaaggaagcgctaaacatggaaaggaacaactggtaccagccactgcaaaatcatgccaaaatgtaaagaccatcgagactaggaagaaactgcatcaactaacgagcaaaatcaccaactaacatcataatgacaggatcaaattcacacataacaatattaactttaaatgtaaatggactaaatgctccaattaaaagacacagactggcaaattggataaagagtcaagacccatcagagtgctgtattcaggaaacccatctcacgtgcagagacacacataggctcaaaataaaaggatggaggaagatctaccaagcaaatggaaaacaaaaaaaggcaggggttgcaatcctagtctctgataaaacagactttaaaccaacaaagatcaaaagagacaaagaaggccattacataatggtaaagggatcaattcaaaaagaagagctaactatcctaaatgtatatgcacccaatacaggagcacccagattcataaagcaagtcctgagtgacctacaaagagacttagactcccacacctaaataatgggagactttaacaccccactgtcaacattagacagatcaacgagacagaaagtcaacaaggatacccaggaattgaactcagctctgcaccaagcagacctaatagacatctatggaaaagaacagaaattataacaaattatctctcagaccacagtgcaaacaaactagaactcaggattaagaatatcactcaaaaccgctcaactacatggaaactgaacaacctgctcctgaatgactactgggtacataacgaaatgaaggcagaaataaagatgttctttgaagccaacgagaacaaagacacaacataccagaatatctgggacacattcaaagcagtgtgtagaggaaaatttatagcactaaatgcccacaagaaaaagcaggaaagatccaaaattgacacccgaacaccacaattaaaagaactagaaaaggaagagcaagcacattcaaaagctagcagaaggcaagaaataactaaaatcagagcagaactgaaggaaatagagacacaaaaaacccttcaaaaaattaacgaatccaggagctgtttttttgaaaggatcaacaaaattgatagaccgctagcaagactaataaagaaaaaaagagggaagaatcaaatagatgcaataaaaaatgataaaggggatatgaccaccgatcccacagaaatacaaactaccatcagagaatactacaaacacctctacacaaacaaactagaaaatctagaagaaatggataaattcctcgacacatacactctcccaagactaaaccaggaagaagttgaatctctgaatagaccaataacaggatctgaaattgtggcaataatcaatagcttaccaaccaagaagagtccaggaccagatgtattcacagccgaattctaccagaggtacaaggaggagctggtaccattccttccgaaactattccaatcaatagaaaaagagggaatcctccctaactcattttatgaggccagcatcattctgataccaaagccgggcagagacgccaccaaaaaagagaattttagaccaatatccttcatgaacattgatgcaaaaatcctcaataaaatactggcaaaacgaatccagcagcatatcaaaaagcttatccaccatgatcaagtgggcttcatccttgggatgcaaggctggttcaatatactcaaatcaaaaaatgtaatccagcaattacacagagccaaagacaaaaaccacatgattatctcaatagatgcagaaaaagcctttgacaaaattgaacaacccttcatgctaaaaactctcaacaaattaggtattgatgggacatatttcaaaataataagagctatctatgacaaaaccacagccaatatcatactgaatgggccaaaactggaagcattccctttgaaaactggcacaagacagggatgccttctctcaccactcctattcaacatagtgttggaagttctggccagggcaattaggcagaagaaggaaataaagggtattcaattaggaaaagaagaagtcaaattgtccctgtttgcagacgacatgattgtatatctagaaaaccccattgactcagcccaaaatctccttaagctgataagcaacttcagcaaagtctcaggatacaaaatcaatgtacaaaaatcacaagctttcttatacaccaacaacagacaaacagagagccaaatcatgagtgaactcccattcacaattgcttcaaagagaataaaatacctaggaattcaagttacaagggatgtgaaggacctcttcaaggagaactacaaaccgctgctcaatgaaatgaaagaggatacaaacaaatggaagaacattccatgctcacggataggaggaatcaatatcgtgaaaatggccatactgatcaaggtaatttatagattcaatgccatccccatcaagctaccaatgcctttcttcacagaattggaaaaaactactttaaagttcatatggaaccaaaaaagagcccacatagccacgtcaatcctaaggcaaaagaacaaagctggaggcatcacactacctgacttcaaactatactacaaggctacagtaaccaaaacagcatggtactggtaccaaaacacagatatagatcaatggaacagaacagaaccctcagaaataatgccgcatatctacaactatctgatctttgacaaacctgagaaaaacaagcaatggggaaaggattccctgtttaataaatggtgctgggaaaactggctagccatatgtagaaagctgaaactggatcccttccttacatcttatacaaaaatcaattcaagatggattaaagacttaaacgttagacctaaaaccataaaaaccctagaagaaaacctaggcgataccattcaggacataggcatgggcaaggacttcatgtctaaaacaccaaaaacaatggcaacaaaagacaaaattgacaaatgggatctaattaaactaaagagcttctgcacagcaaaaaaaaaactaccatcagagtgaacaggcaccctacaaaatgggagaaaattttcgcaacctactcatctgaaaaagggctaatatccagaatctacaatgaactcaaacaaatttacaagaaaaaaacaaacaaccccatccaaaagtgggcaaagaacatgaacagacacttctcaaaagaagacatttatgcagccaaaaaacacatgaaaaaatgctcatcatcactggccatcagagaaatgcaaatcaatccacaatgagataccatctcacaccagttagaatggcaatcattaaaaagtcaggaaagaacaggtgctggagaggatgtggagaaataggaacacttttacactgttggtgggactgtcaactagttcaaccattgtggaagtcagtgtggcgattcctcagggatctagaactagaaataccacgtgtcccagccatcccattactggatatgtactgaaaggactataaatcatgctgctatagagacacatgcacacgtatgtttactgaggcattattcacaataggaaagacttggaaccaacccaaatgtccaacaatgatagactggattgagaaaatgtggcccatatacaccatggaatactatgcagccataaaaatgatgagttcatgtcctttgtagggacatggatgaaattggaaatcatcattctcagtaaactatcgcaagaacaaaaaaccaaacaccgcatattctcactcataggtgggaattgaacaatgagatcacatggacacaggaaggttactatcacactctggggactgttgtggggtgggggcggggggaggggtagcattgggagatatacctaatgctagatgacgagttagtggttgcagcgcaccagcatgacacacatgtatacatatgtaactaacttgcacaatgtgcacatgtaccctaaaacttaaagtataataaaaaaaaaatcattctgaggaacttctttgtgatgtgtgcattcatatcagagaattgaacgtttcttttgattgagcagtttggaaatactctttttgtccaaactacaggtggatatttggatcgctttgaggcctattgtggaaagggaaatatcttcacataaaaactacacagaagatttctgagaaacttatttgctatgtgtgcattcaactctcagtgttgaacctatctttgaatgagcagttttgaaactccctttttggaaaatctgcaaatcgatatttggacccatttgcagcttatggtggaaaaggaaatatcttcaattaaaaactacaccgaagcattcttagaaaattctttgtggtgtgtgcattcatgtcacagagttgaaactttcttttgatagagcagttttgaaacactctttttgtagaaactacaggtggatatttggagcgctttgaggcctattgtggaaagggaaatatcttcacataaaaactacacagaagcattctgagaacgttctttgtgatgtgtgccttcaactctcagtgttgaacctatctttgattgagcagttttgaaactccctttctggaaaatctgcaaatggatacttggagccgtttgcagcctatggtggaaaaggaaatatattcaaataaaaactacacagaagcattctgagaaaattctttgtggtgtgtgcattcatgtcacagagttgaaactttcttttgattgagcagttttgaaatattctttttgtagagtctgcatgtggatatttggagtgctttgaggccaatggtggaaaaggaaatatcttcacagaaaaaatacgcagaataattctgagaaattacttagtgatgtgtgcatacatctcacagagttgaaaccttcttttgattgagcagttttgaaacactctttttattgaatctgcaagtggatatttggagtgctttgaggcctatggtggaaaaggaaatatcttcacataaaaactactcaaaaacattctgagaaacttctttgtgatatgtgcatttatctcacagagttgaggatttcttttgattgagcggtttggaaacttctttttgaagaatctgcaagtggatatttggagcgctttgagtcctatcgtggaaaaggtaatatcttcacataaaaagtacatagaagcattctgtgaaacttgtttttgatgtgtgcattgcactcacgtaggtgaacctatcttttcattgagcagttttgaaacactctttttgtggattccacaagtggatgtttggagcgttttgaaggttaagctggaaaaggaactatcttcacataaaaactatacagaagctttctgagaaacttctttgtgatgtgtgcaatcaactcacagatttaaacccatcttctgattgagcagttttgaaagtctctttttgtagaatctgcaagtggatatttggaaccgtttgtggcctatgggggaaaaggaaatatcttcacataaaaactacacagaagcattttgaaaaacttctttgtgatgtgtgcattcatctcacatagttgaaccttatttttgattgaacagttttgaaacttctttttgttgaatctgcaagtggatatttggagctatttgtggcctatggttgaaaaggatatatgttcacataaaagctatagagaagaattctgagaaacttctttgtgacgtgtgcagtcaactcacagagttgaacctatcttttgaaagagcagtttgaaacactctttttgtagaatctgcaagtggatatttggagccttttgcatcctatagtggaaaaggaaatattttcacatagaaactacacagaatcattctgagaaacttctttgtgatgtgtgcattcatctcacagagctgaacctttcttttgattgagcagttttgaaacactctttttgtagattctgtaagtagatatttggagtgctttgaagcctattgtggaaaaggaaatatcttcacataaacactacaaagaggcatgctgagaaacttctttgcgatgtgagcattcatctcacagaggtgatcctttcttttgtttgagcagtggggaaactctctttttttagaatctgcaagtggatatttggagcgctttgaggcctattcaggaaaagggaacatcttcacacaaaaactacaaagaaacattctgagaaactactttgtgatgtgtgcattcatctcacagagttgaacttttcttttgattgagcagttttgaaaatctctttttatggaatctgcaagtggatatttggagtgctttgaggcgaattgtggaaaaggaaatatgttcacataaacactacacagaagcattctgagaaacgtcttcgtgacatgggccttcatctcagagagttgaacctttcttttgattgagcagttttgaaactctctttttgtagagtctacaagtggatatttggagacatttgtggcctatggtggaaaaggaaatatcttcacataacaactacacagaagcattctgggaaacttcattttgatgtgtgcaatcaactcacagatttgaaattatcttttaattgagcagtttgaaactctctttttgtagaatctgcaagtggatatgtggagccatttgcagtctatggtggaaaaggaaatatcttcacatagaaactacacagaagcattgtgagaaactactttgtgttgtgtgtaatctactcacagagttgaacatatcttttgattgagcagctttgaaactctctttttgtagaatctgtaagtggatatttggagccttttgtggcctatggtggaaaaggaaatatctacaaattaaaactacacagaagcattctgagaaacttctttgtgatgtgagcattcatctcacagagttgaatctttcttttgattgagcagtttgaaaatgctctttttgtagaatctgcaagtggatatttggagtgccttgaggcctattgtggaaaagggaaacatcttcacataaaaactacacagaagtaatctgataaacttctttgtgatgtgtgcattcatctcacagagttgaacctttatttttattgagcagtttggaagaactctttttgtacattctgcaagtagatattctttgtgatgtgtgcattcaactcacagagttgaaagtatcttttgattgagtagttttgaaacagtctttttgtagaatctgcaagtggatatttggagtgctttgaggcctgtggtggaaaacgaaatatcttctcatcaaaaatacacagaagcatattgagaaaattcttgtgatgtgtgcattcatctcacagagttgaatctttcttttgattgagcaattttgaaacactcgttttgtagaatctgcaagtggatatttggagcgccttgaggcctgttgtggaaaagggaaacatcttcacataaaaactacacagaagtaatctgagaaacttctttgtgatgtgtgcattcatctcacagagttgaatctttattttgattgagcagtttggaagaacttttttgtacattctgcaagtggatatttggagtgctttgaggcctattctggaaaaggaaatatcttcacacaaaaactacacagaagcattctgagaaacttctctgtgatgtgtgcattcaactcacagagttgaaagtgtcttttgattgagtagttttgaaacagtctttttgtagaatctgcaagtggatatttggagtgctttgaggcctatggtggaaaaggaaatatcttctcatcaaaaatacacagaagcgtactgagaaaattcttgtgatgtgtgcattcatctcacagagttgaatctttcttaagattgagcaattttgaaacactcgttttgcagaatctgcaagtggatatttggagcgctttgaggcctattttggaaaaggaaatgtcttcacatagaaactacacagatgcattctgagaaacttctttgcaaagtgtgcgttcatctcagagagttgaagctttcttttgattgagtcgttctgaaactctctgtatgtcgaatctgcaagtggatatgtggagccttttgtgggctatggtgcaaatgaaaatatcttcacatgaaagctacaaagaagcattgtgacaaaattctttgtgatatgtgtattcacctcacagagttgaacacttcttttgattgagcagtttgaaaacactcttttgtagaatctgcaagttgatatttagagagctttgaggcctattttggaaaacgaattatcttcacataaaaactacacagaagaattctgagaaacttctttgtgatgtgtgcattcatctcacagagttgaaccttccttttgattgagcagttttgaaacactctttttgtagaatcttcaactgtatatttggagagctttgaagcctctggtggaaaaggaaatatcttacaataaaaacaacacagaagcattctgatgaacttctttgtgatgtcttcattcatctcacagagttgaaaatttcttttgattcagtagttttgaaacactccttttgtagaatctgcaagtggatatttggagttctttggggcctattgtggaaaacgaaatatcttcacataaaaactatacagaagcattctgagaaacttctttgtgatgagtgtattcaactcaccgagttgaacctatcttttgatggaacagttctgcacctctctttttgtagaatctgaaagtggatattttgagccctttgcggcatatggtggaaaaggaaatatctactcataaaaactacacaaaagaaatctgagaaatttctttgggttgtttgcattcatctcacagagttgaaactttcttttgtttgagaagtttgtaaacactaatttgtagaatctgaaagtggatatttggagtgctttggggcctactgtggaaaaggaaatatcttcacctaaaaactacatagacgcattctgagaaacttctttgtgatgtgtggattcatcttactgagttgatccattcttttgattaagcagtttgaaaacactctttttgtagaatctgcaaatggatattttcggttctttgatgtctatggtggaaaaggaaatatcttcacataaaaaatacacagaagcattctgggaaacttcattgtgatgtgtgcattcaactaacagagttgaacgtatcttttgattgagaagttttgaaactcactttttatacaatctgcaattggatatttggagacctttgcggcctatgttggaaaaggaaatatcttcacataaaaactgcacagaagctttctgagaaacttctttgtgatgtgtgcattcaactcacagacttgtacctatcttttgattgagcaattttgaatctctctctttgtagaatctgcaagtggatatttggagccccttgcggtctacggtggaaaaggaaatatcttcatataaaaaatacacagaagcattctgagaaaattctttgtgatcagtgcattcttctcacagagttgagcttttctttctattgagtattttgaaaaactctttttgtacagtcagcaagtggataattgtagtgctttgaggtctattgtggaaaaggaaatatcttcacataaagactacacagaaacagtctgagaaacttctttgtgatttgtgttttcatgtcatagagttgaaactttcttttgattgagcagtttggaaacactctttttgtataatctgcaagtgaatgtttggagtgcattgaggcctatggtgtaaaaggaaatatcttcacataaaaattacacagaagctatctgagaaatttctttgtgatgtgtgtattcatctcacagagttgaattttttttttcttttattattatactttaagttttagggtacatgtgcacactgtggagattagttacatatgtatacatgtgccatgctcgtgcactgcacccactaactcgtcatctagcattaggtatatcttccaatactatccctcccccctacccccaccccacaacagtccccagagtgtgatgttccccttcctgtgtccatgtgatctcattgttcaattctcacctatgagtgagaatatgcggtgtttggtttcttgttcttgcgatagtttactgagaatgatgatttccaatttcatctatgtccctacaaaggacatgaactcatcactttttatggctgcatagtattccatggtgtatatgggccacattttcttaatccagtctatcattgttggacatttgggttggttccaagtctttgctattgtgaatagtgctgcaataaacatacgtgtgcatgtgtctttatagcagcatgatttatagtcttttgggtatatacccagtaatgggatggctgggtcaaatggtatttctagttctagatccctgaggaatcgccacactgacttccacaatggttgaactagtttacagtcccaccaacagtgtaaaagtgtttctatttctccacatcctctccagcacctgttgtttcctgactttttaatgatcaccattctaactggtgtgagatggtatctcattgtggttttgatttgcatttctctgatggccagtgatgatgagcattttttcatgtgttttttggctgcataaatgtcttcttttgagaagtgtctattcatgtcctttgcccacttttggatggggttgtttgtttttttcttgtaaatctgtttgagttcattgtagattctggatattagccctttgtccgatgagtaggttgcaaaaattttctcccatgttgtaggttgcctgttcactctgatggtagtttcttttactctacagaagctctttagtttaattagatcccatttgtcaattttgtcttttgttgccattgcttttggtgttttagacatgaagtccttgcccatgcctatgtcctgaatggtattgcctaggttttcttctagggtttttatggttttaggtctaatgtttaagtctttaatccatcttgaattgatttttgtataagatgtaaggaaaggatctagtttcagctttctacatatggctagccagtttccccagcaccatttattaaatagggaatcctttccccattgcttgtttttctcaggtttgtcaaagatcagatagttgtagatatgtggtgttatttctgagggctctgttctcttccattgatctgtatctctgttttggtaccagtaccatgctgttttggatactgtagccttgtagtatagtttgaagtcaggtagtgtgatgcctccagctttgttcttttggcttaggattgacttggcgatgtgggctcttttttggttccatatagactttaaagtagttttttccaattctgtgaagaatggcattggtagcttgatggggatggcattgaatctgtaaattaccttgggcagtatggccattttcacgatattgattcttcctacccatgagcatggaatgttcttccatttgtttgtatcctcttttatttcattgagcagtggtttgtagttctccttgaagaggtccttcacatccctggttattgggattcctaagtattttattctctttgaagaaattgtgaatgggatttcactcatgatttggctctctgtttgtctgttgtcagtgtataagaatgcttgtgatttttgtacattgattttgtatcctgagactttgctgaagttgcttatcagcttaaggagattttgggctgagtcaatggggttttctagatatacaatcatgtcgcctgcaaacagggacaatttgacttcctcttttcctaattgaataccctttatttccttctcctgcctaattgccctggccagaacttccaacactatgttgaataggagtggtgagagagggcatccctgtcttgtgccagttttcaaagggaatgcttccagttttggcccattcagtatgatattggctgtgggtttgtcataattagctcttattattttgagatatgtcccatcaatacctaatttattgagagtttttagcatgaaatgttgttgaattgtgtcaaaggccttttctgcatctattgagataattatttagtttttgtctttggttgtttatatgctggattacatttattgatttgcatatattgaaccagccttgcatcccagggatgaagcccacttgatcatggtggatgagctttttgatgtgttgctggattcggtttgccagtattttattgaggatttttgcatcaatgttcatcaaggatattggtctaaaattctcttttttcattgtgtctctgcctggctttggtatcagaatgatgctggcctcataaaatgagttagggaggattccctctttttctattgattggaatagtttcagaaggaatggtaccagctcctccttgtacctctggtagaattcggctgtgaatccatctggtcctggactctttttggttggtaagctattgattattgccacaatttcagatcctgttattggtctattcagagattcaacttcttcctggtttagtcttgggagagtgtatgtgtcgaggaatttatccatttcttctagattttctagtttatttgtgtagaggtgtttttagtattctctgatggtagtttgtatttctgtgggattggtggtgatatcccctttatcagtttttattgcatctatttgattcttccctctttttttctttattagtcttgctagcagtctatcaattttgttgatcctttcaaaaaaccagctcctggattcattaattttttgaagggtttttttgtgtctctatttccttcagttctgctctgattttagttatttcttgccttctgctaccttttgaatgtgtttgctcttgcttttctagttcttttaattgtggtgttagggtgtcaattttggatctttcctgctttttcttgtgggcatttagtgctataaatttacctctacacactgctttgaatgtgtcccagagattctggtatgttgtgtctttgttctcgttggtttcaaagaacatctttatttctgccttcatttcgttatgtacccagtagtcattcaggagcaggttgttcagtttccatgtagttgagcggttttgagtgagattcttaatcctgagttctagtttgattgcactgtggtctgagagatagtttgttataatttcttttcttttccatttgctgaggagagctttacttccaagtatgtggtcaattttggaataggtgtggtgtggtgctgaaaaaaatgtatattctgttgatttggggtggagagttttgtagatttctattaggtctgcttggtgcagagctgagttcaattcctgggtatccttgttgactttctgtctcgttgatctgtctaatgttgacagtggggtgttaaagtctcccattattaaggtgtgggagtctaagcctctttgtaagtcactcaggacttgctttatgaatctgggtgctcctgtattgggtgcatatatatttaggatagttagctcttctttttgaattgatccctttaccattatgtaatggccttctttgtctcttttgatctttgttggtttaaagtctgttttatcagagactaggattgcaacccctgcctttttttgttttccatttgcttggtagatcttcttccatccttttattttgagcctatgtgtgtctctgcatgtgagatgggtttcctgaatacagcaccctgatctgtcttgactctttatccaatttgccagtctgtgtcttttaattggagcatttagtccatttacatttaaagttaattttattatgtatgaatttgatcctgttatgatgatgttagctggttattttgctcattagttgatgcagtttcttcctagtcttgatggtctttacattttggcatgattttgcagcggctggtgctggttgttcctttccatgtttagcgcttccttcaggagctcttttatggcagacctggtggtgacaaaatctctcagcatttgcttgtctgtaaaggattttatttctccttcagttatgatgcttagtttggttgggtatgaaattatggtttgaaaattcttttctttaagaatgttgaatatttgtccccactctcttcaggcttgtagggtttctgccgagagatctgctgttagtctgattggcttccctttgagcataacccgacttttctctctggctgcccttaacattttttcgttatttcaactttggtgaatctgacaattgtgtgtcttggagttgctcttctcgatgagtatctttgtggtgttctctgtatttccttaatctgaacgttggcctgccttgctagattggggcagttctcctggatagtatcttgcagagtgttttccaacttgattccattctccccgtcactttcaggtacaccaatcagacgtagatttggtcttttcacatagtcccatatttcttggaggctttgctcatttctttttattcttttttctctaaacttcccttctcacttcatttcattcatttcattttccattgctggtaccctttcttccagttgatcacatcggctcctgaggcttctgcattcttgacgtagttcttgagcattggttttcagctccatcagctcctttaagtacttctctgtattggttattctagttttacattcttctaaatttttttcaaagttttcaacttctttgcctttggtttgaatgtcctcccatagctcagagtaatttgatcttctgaagccttcttctttcagctcttcaaagtcgttctccgtccagctttgttccgttgctggtgaggaactgcattcctttgaaggaggagaggcgctctcagagttgaatttttcttttgactgtggagtttggaaacactctgtttgtagaatctgcaaggggatatttggagacctttgttgccttttgtggaaaaggaatatcttcagataaaaactacacagaagcattctgatgaatttctttgtgatgtgtgcattcatctcacagagttgaactttgtttggactcagtagttttgaaacactctttatgtagaatctgcaagtggatatttgtagcgctttgggtccttttgtggaaaaggaaatatcttcacctaaaaactacacagaagcattctgagaaacttctttgtgatgtgtgcattcttctcatggagctaaacctttctttttattgagcaatttggaaacactctttttgtagaatctgcaagtggtcactttgagcactttcaggcctatggtggaaaagaaaatatcttcacatataaactacacagaaacattctgagaatcttctttgtgatgtgtgtattaaactcacagagttgaacctatcttttgatggagcagttttgaaactctctttttgtagaatctggaagtggatattggggagctttgaggtctattgtggaaagggaaatatcttcacataaaacctacacagaagcatattgagaaaattcttgtgatgtgtgcattcacctcacagagttgaacctttcttttgattgaatacttttgaatcactcgttttgtagaatctgcaagtggatgtttggagagctttgaggaaaaggaaatatcttcacataaaaactacacagaccattctgagaaacttctttgccatgtgtgcattcatttcacaaagtgaacttttcttttgatactgcagtttttcagcactctttttgtagaatctgcaagtagatatttggagcaccttgaggcctctagtggaaaaggaaatatcctcacataaaaattacacagaagtattctgagaaacttctttgtgatgtttactttcatgtcacagatttgaacctgactttggattgaacagttttgaaacactctttttgtagaatctgcaagaggatggatggagcgctttgaggaaatggtggaaaacgaaatatcttcacataaaaactacacagaagtattcagagaaacttctttgttatgtgtgcattcatttcacaaatttaaacctttcttttgatagagcagttttgaaactctctttttgtagaatctaaggtgaatatttgaagccctttgcagccaacggtggaaaaggaaatatcttcacatgaaaactacacagagtcattctcagaaacttctttgtgatgtgtgaattcatctcacagagttgaagctttcttttgattgagcagttttgaaaaacatcttttgtagaatctgcaaatggatatttggagcgccttgaggcctattttggaaaaagaaatatatacacataaaaactacacagaagcattctgataaacttctttgtgatgtgtgcattcatctgactgagttgaagctttcttttgattgagcagtttggaaacactctttttgaagaatctgctagtggatatttggagtggtttcaggccaatggtggaaaaggcaatatcttcacataaaaactacacagaagaattctgagaaacttcttttggatgtgtgcattcaactcacagatttgaacctatcttttgattgagcagttttgaacctctctttttgtagaatctgcaagtggggatttggatccctttgtggccaatgatggaaaaggaaatatcttcacataaaaactttgcagaagtattctgagaaacttatttgcaatgtcttcattcatctcgtaaggttaaacctttcctttgattcagcagttttgaaacattctttttgtaaaatctgcaagtggatatttggggtgctttgaggtttattgtggaaaaggatatatcttcatataaaacctacacagaagcgttctgagaaacttctttgtgatctgtgcattcatctcacagaattgaacctttcttttgattgagtagttttgaaacactctttttgtaacttctgcaagtggatatttggagctatttgaggcctattgtggaaaaggaaatattttcacatagaaactacacagaagcattctgagaaacttctttgtgatgtgtgcattcatctcacagagttgaacctttttttttttgttcagcaattttgaaacactctttttgtagaatctgctagtggatatttggagctcgttgaggcctattgtgaaaaagtaaatatcttcacataaaaactatgtggaagttttctgacacatttctttgtgatgtgtaaattcaactcacaagttgacctatctgttgtttgagcagttctgaaactcttttagtagaatctgcaaatggatatttggagccctttgtggcctatggtggaaaaggaaatatcttcacataaaaactacccagaagcattctgagacacttctttgtgatgtgtgcattcaactcgcagacttgaacgtatcttttgattcagcagttttgtatctctctttttgtagaatctgcaagtggatattttgtgtccttcgtggcctactgtggaaaaggaaatatcttcacataaaaactacacataagcattctgagaaacttctttgtgatgtgtgcattcatctcatagagttgaacatgtcttttttttttacattttaatttttaaaaatttatttatttttttcttttattattattatactttaagtttagggtacatgtgcacaatgtgcagggtagttacatgtgtatacatgtgccatactggtgtgctgcacccattaactcttcatttagcattaggtatatctcctaaagctatccctccctcctccccccaccccacaacagtcccacgagtatgatgatccccttcttgtgtccatgttttctcattgttcaattctcacctatgagtgagaatatgcaatgtttggttttttgctcttgccatagtttactgagatgatgagttccaatttcatccatgtccctacaaaggacatgaactcatcattttttatggctgcatagtattccatggtgtatatgggccacattttcttaatccagtctatcattgttggacatttgggttggttccaagtctttgctactgtgaataatgccgcaataaacatacgtgtgcatgtgtctttatagcagcatgatttatagtcctttgggtatatacccagtaatgggatggctgggacacatggtatttctagttctagatccctgaggaatcgccacactgacttccacaatggttgaactagttgacagtcccaccaacagtgtaaaagtgttcctatttctccacatcctctccagtacctgttgtttcctgacattttaatgatcgccattctaactggtgtgagatggtatctcattgtggttttgatttgcatttctctgatggccagtgatgatgagcattttttcatgtgttttttggctgcataaatgtcttcttttgagaagtgtctgttcatgtcctttgcccacttttggatggggttgtttgtttttttcttgtaaatttgtttgagttcattgtagattctggatattagccctttgtcagatgagaaggttatgaaaactttctcccattttgtaggttgcctgttcactctgatggtagtttcttttgctgtgcagaagctctttagtttcattagatcccgtttgtcaattttgggttttgtttccattgcttttggtgtttagacaagaagtccttgcccatgcctgtgtcctgaatagtaatgtctaggttttcttctagggtttcatggttttaggtctaacgtttaagtctttaatccatcttgaattaatttgagcagttttgaaacaatcttttagtagcatctgcaagtggatatttggagtgctttgaggcctattgcggaaaaggaaatatcttcacatgaaaactacacagaagcattctgagaaacttctatgtgatgtgtgcattcatcccatggtgttgaattttcttttgattgagcagttttgaaacactcttcttgtagaatctgcaaggtgatatttggagcccttcgaggcctatggtggaaaaggaaatatcttcacctaaaacctacacagaagcattctgagaatatacttggtgatgttggcattcacctcacagtgttgaacctatcttttgactgagcagttttgaatccgtctttttgtagaatcttcaggtgtatatttggagccctttgcgacctattgtggaaaaggaaatgtcttcacataaaaactacacagaagcattctgagaaacttctttgtgatgtgtgctttcatcacacagagttgaaagtttcttttgattgagcagtgtgaagcactctttttgtagaatttgcaagtagatatttttagtactttgacacatattgtggaaagggaaatatcttcacatgaaaactacacagaagcattctgagaaacttcattgtaatgtgtgcattcatttcacagagttgaacttttcttttgatagagcagtttggaaacactctttttgcagaatctacaagtgtacatttggagcgctttgaggcttatggtggaaaaggacatatcttcacataaaaactacacagaagcattctgagaaacttctttgtgatgtgtgtattcaactcacagagtggaacatatgttttgatagagcagttttgaaactctctttttggagaatctgcaagtggatatttggagcccattgtggcctatggtgttaaaggaaacgttctcacataaaaactgcacagaagcattctgagaaacttctttgtgaggtgtgcagtcatctccactgttgaacctttcttttgattgagcagttttgaaacatttttttgtgatatttgcaagtggatatttggatcactatgaggcctatagtggaaaaggaaatatcttcaccaaaaaactacacagaagcattctgagacacttcctagtgatttgtgcatttatctcacagagttgaaactttcttttgaatgagcagttttgaaactctctttttgtagaatcttcaagtgcctgtttggagtgctttcaggcctatggtggaaaaggaaatgtcttcacataaaaattacacaggagaattctgagaaacttctttgtgatgtgtgcattcaactcacagagttgaacctatttttgagagagaagctttgaaactctctttttgtagaatctgcaagtggatatttggagcccttggaggcctatggtggaaaacgaaatgtcttcacataaaaactacacagaagcattctgagaaacttctttgtgatgtgtgcattcatctcacagaattgaacctttcttttgattgagcagttggaaacactctttttgtacaatctgcaagtcagtatttggagtgccttgtggcctgtggtggaaaaggaaatatcttcacataaaaactacacagaggcattctcagaatcttctttgtgatgtgaacattcaactaacagatttgaccttctctttcaattgagcagttttgcatctctctttctgtataatctgtaagtgggtaattggagccttttgtggcctgttttggaaaaggaaaaatcttcacatgaaaactacacagaagcattctttgaaactgctttgtagtgtgtgcattcatctcacagaattgaacaattcttttgattgggcagttttgaaacacactttttatggaatctgcaagtggatatttgaagcgcttagaagcctattatggaaaaggaaatatcttcacattgaaactacacagaagcattcagagaaacttctttgggatgtgtgcattcagctcacagagttgaacctatctttttagagagaagttttgaaactctctttttgtagaatctgcaagtgcatatttggaactctttgaggcctatggtggaaaaggaaatatcttcacataaaaactacacagaagcattctgagaaacttctttgtgatttgtgcattcaactcacagagttgacctatctttttagagagaagctttgaaactctctttttgtagaatctgcaagtggatatttggagccatttgaggcctatggtggaaaaggaaatatcttcatataaaaactagacagaagcattctcagaaacttctttgtgatgtgtgcattcatctcacagagttgaacctttcttttgattgagcagttggaaacactctttttgtacaatctgcaagtcagtttttagagcgccttgaggcctatggcggagaaggaaatatcttcacataaaaactacacagaagcattctcagaatcttctttgtgatgtgagcattcaactcacagagtagagcctctgttttcattgagcagttttgaatctctctttctgtataatctgtaagtggatatttggagccctttctggcctgttttggaaaaagaaatatcttcacacaaaaactacacagaagcattctgagaaacttctttgtaatgtgtgcattcatctcacagagttgaatatttcttttgattgggcagttttgaaacacactttttatggaatctgcaagtggatatttgaagcgcttggaagcctattatggaaaaggaaatatcttcacattaaaaggacacagaagcattcagagaaacttctttgggatatgtgcattcatctcagagagttgaacctttcttttgattgtacagttaaaaacactctttttgtagaatctgcaagtgaacatttggagtgctttgtggcctgaggtggaaaaggcaatatcttcacataaaaactttatagaagcattctgagaaacttttttgatttgtgcattcatctaacagaagtgaagctttcttttgatggacctggtttgaaatactctttttgtggaatctgcaagtggacatttggaacactttgaggcctatggtggaaaaggaaatatgttcacataaaaactacacagaagaattctgagaaacttatctgcgatgtgtgcattcatttcgcagatttcaacgtttattttgattgagcagttaggaaacactctttttgtagaatctgcaaatggacatttggagcgctttgtggattatgttagaaaacgaaatatattcacatgaaaactagacaaaaaaattctgagaaacttcttggtgatgtatgcgttcatctcacagagttggacctttcttttgattgagctgtttggaaacactcttttgtggaatctgcaaatggatatttggagcgctttgctgcctatgatagaaaagcaaatatcttcacataatatctagacagaagcaatctgagaaacttatttgcgatgtgtccattcaagtcaccgagttaaaccgttcttttgattgagcagttttgaaactctttttgtaaaatctgcaactggacatttggagcgctttaaggcctatgttggaaaaggaaatatcttcatataaaaactagacagaataattctgagaaacttctttagaatgtgtgtgttcatctcacagagttatacctttctttttattaagcagttttgaaactctctttttgtagaatctgcaagtggacatttggagcgctctgtggtctatggtagaaaaggaaatatcttcacataaaatctagacagaagcaatctgagaaacttctttgtgatgtgtgcattcatctcacagagttaaacgtttcttttgattgagcagttttgaaactctgtttttgtagtatctgcaagtggacatttggagcgctttgaggcctatggtggaaaaggaaatatcttcacataaaaactagacagaagaattctgagaaacttccttgtgatgtgtgcgttcatctcacagagttgaacctttcttttggttgagcagtttggaaacactccttttgtagaatctgcaagtggacatttggatcactttgcagcctatgtttgagaaggaaatatcttcacaacaaaacaagacggaagaattctgagaaacttctttgtgatgtgtgcattaatcccacagagttgaatgtttgttttcattgagcagtttggaaacaatctttttgtagaatctgtaagtggaaatttggagcgcattgcggcctattgtagaaaaggaaatatcttcacataaaatctagacagaagaaatttgagaaactcctttgtgatgtgtgtgttcatctcacagagttgaatctttctttttattgagcagtttggaaacactctttttgtagaatctgcaagtggacatttggagcactttgaggcatatggtggaaaaggaaatatgttcacataaaaattagacagacgaattctgagaaactactttttgatatgcgttcatctcacacagttgaacctttcttttgattgagtagtttggaaacactctttttgtagaatctgcaagtggacatttggagtgctttgcggcctatggtagaaaaggaaataccttcacataaaatctagacagaagcaatctgagaaatttctttcttatgtgtgctttcatctcacagagttgaacttttcttttgattgagcagtttggaaaaactctttttgtgcaatctgcaactggacatttggagcgctttgcagcctaagttagaaaatgaaatatcttcacataaaaactagacagaagaattctgagaaacttccttgtaatgtgtgcgtttatctcacagagttgaacctttcttttgattcaggtgtttggaaactctctttttgtagaatctgcatttggacatttggagccctttttggcctatggtagaaaaggaagtatcctcacataatatctagacagaagttatctaagaaacttctttttgatgtgtgcattcttctcaccaagttaaacctttctattgattgagcagttttgaaactctctttttgtagaatgtggaagtagacatttggagcactttgagacctctggtggaaaagggaatatcttcacataaaaagaagatagaagaattctgagaaacttccttctgatgtgtgcgttcatctcacagagtcgaacaattgttttgattgagcagtttggaaacactctttttgtagaatctgcaagtggacatttggagtgctttgtagcctacggcagaaaaggtaatgtcttcacatgaaatctagacagaagaaatctgagaaaatactttttgatgtgtgtgttcatctcacagacttgaatcttttttttgattgagcagtttggaaatactctgttttctagaatctgcaagtggacatttggaacgctttgcggcttaaggtagaaaaggaaatatcttcaaataaaatctagacagaatcaatctgaggaacttctttgtgatgtgtgcattcgtcccacagagttaaacctttcttttgattgagaagttttgagactctttttgtagtacctggaagtggacatttcgaaggccttgaggcctatggtggaaaaggaaatatcttctcataaaaactagactgaagtattctgtaaaactcctttgtgatgtttgcattcaactcagaaagttgaacttctctttatatagtccagttttcaaacactatttttgtagaatctgcaagtggatactgggactgctttgaggccttcgttggaaacgggattatcttcacatagaaactagactgaaggattcttagaaacttctttgtgatgtgtgcattcaactcaccgagtggaacctcacttttgatagagcagtgttgaaagacacttgttgtagaatctgcaggtggatatttggagtgctttgaagccttccttggaaacgggaatatcttcacataaaaactagacataagcattctcagaaactcctttgtgatctgtccattcagctcacagagttgaaccttccttttgatagagcagttttgaaacactctttctgtagagtctgcaagtggatatcaggagcgctttgaggcctatggtagaaaaagaaatatctgcatataaaaactagacagaagcattctgagaaacttctttgtgatgtttgcattcaactaccagagttgaaccttccttttgatagagcagttttgaaacactctttgtgtagaatctgcatgtggatatctggagcgatttgaggcctatggtcaaaaaggaaatatcttcctatgaaaaacagacaaaagcattctcagaaactacttagagatatgtgcattcaactcacagagttgaaacttttttttgatagagcagttttgaaacactctgtagaatctgaaagtggatatttggagctatttgagggctatggtggaaaagaaaatatattcccattaaactagacagaagcatcctcagaaacttctttatgatgtttgcattaaactcacagagttgaacatacctttccatagagcagttttgaaacactctttttggggaatccgcaagtggatatttggaccgctttgagacctttgctggaaatgggaatatcttcacatataaactagacagaagcattctcggaaacttcttcgtgatgtgtgcattctgctcccaaagttgaaccttccttttcataaagcagttttgaaacactcttttgtacaatctaccattggatatgtggaaggctttgatgcccatggtagaaatggaaacatcctcatataaaatctagacagaaggattcacagaaactgctgtgtgatgtgtgcatccaaatcacggagttgaacttttcttttgttagagcagttttgaaaccctgtttccgtggaatctgccagtggacatttggagcgcattgagggctatggtggagaaggaaatatcttcacataaaaactagaaagaagcattctcagaaacatctatgtgaagtatgcattcaactcacagagttgaaccttccttttgatagaagagttttgaaacactcttttgtacaattgcaggtgaatatttggagcgctttgaagcctttgttggaaatgggaatatcctcacattaaaaactagccagaagcattctcagaaacttctttgtgatgtgtgcattgaacccagagagatgaaccgttcctttgagagagcagttttgaaacgtgtttttgtaagatctgcaagtggatatttggggcgctttgagtccttaggtggaaacgggaatatcttcgaataaaaactagacagaattattctcagaatcttctttgtgatgtgggcattcaactaacacagttgaacatttcttttgacagagcagttctgaaacactctttttgtagaatccgccagtggatatttggagcgctttgagggctattgtgcaaatggaaatatcttcacctaaaaactagaccgaagcaatcccagaaactactttgtgatgtttgcattcaactcacagagttgaacctacctcttcatagggcagtttggaaaacctctttttgtagaatctgcaagtggatatttggaccactttgaggccttcataggaaacagtactatcttcacataaaaactaggtagaagcattctcagaaacttctttgtgatgtgtgaattcaactcacagagttgaaccttcctttaatagagcagttttgaaacactctttttgtagaatttgccagtagatatttggagcgctttgaggccttcgttggaaaccggaatatcttcacataaaaagtagatagagccattctcagaaacttttttgtgatatgtagattcaactcacagcgttgaacctttcttttgatagagcagttttgaaaaactcttttatcgaatctgcaagtagacatttggagtgctttgagggctgtggtcgaaaaggaaatatcttcacatagaaactagactgaagcattctcagcaacttctttgtgacgtttgcattcatctcacagtgttgaacataccttttcatagagcagttttgaaacactatttttgtagtatctgcaagtggatatttggactgctttgaggccttcattggaaacgggaatatcttcacataaacactagacagaagcattctctgaaacttctttgtgatgtgtgtattcaactcacagagttgaaccatcttttttatggagcggttttgaaacagcgtttttgtagaatcagcaagtggatattgggaacactttgaggcctctggtggaaagggaatgtcttcacataaaaactggacagaagcattctcagaaacatctttgtgatgtttgcattcaactcacagagttgatccttccttttaatagggcagttttgcaacactctttttgtagaatgcaccagtgggcttttggagcacgtcaagggctatggtgaaaaaggaaatatcttctcataaaaactagactgaagtattctgtaaaactcctttgtgatgtttgcattcaactcagaaagttgaacttctctttatatagtccagttttcaaacactatttttgtagaatctgcaagtggatactgggactgctttgaggccttcgttggaaacgggattatcttcacataaaaactagactgaaggattcttagaaacttctttgtgatgtgtgcattcaactcaccgagtggaacctcacttttgatagagcagtgttgaaagacacttgttgtagaatctgcaggtggatatttggagtgctttgaagccttccttggaaacgggaatatcttcacataaaaactagacataagcattctcagaaactcctttgtgatctgtccattcagctcacagagttgaaccttccttttgatagagcagttttgaaacactctttctgtagagtctgcaagtggatatcaggagcgctttgaggcctatggtagaaaaagaaatatctgcatataaaaactagacagaagcattctgagaaacttctttgtgatgtttgcattcaactaccagagttgaaccttccttttgatagagcagttttgaaacactctttgtgtagaatctgcatgtggatatctggagcgatttgaggcctatggtcaaaaaggaaatatcttcctatgaaaaacagacaaaagcattctcagaaactacttagagatatgtgcattcaactcacagagttgaaacttttttttgatagagcagttttgaaacactctgtagaatctgaaagtggatatttggagctatttgagggctatggtggaaaagaaaatatattcccattaaactagacagaagcatcctcagaaacttctttatgatgtttgcattaaactcacagagttgaacatacctttccatagagcagttttgaaacactctttttggggaatccgcaagtggatatttggaccgctttgagacctttgctggaaatgggaatatcttcacatataaactagacagaagcattctcggaaacttcttcgtgatgtgtgcattctgctcccaaagttgaaccttccttttcataaagcagttttgaaacactcttttgtacaatctaccattggatatgtggaaggctttgatgcccatggtagaaaaggaaacatcctcatataaaatctagacagaaggattcacagaaactgctgtgtgatgtgtgcatccaaatcacggagttgaacttttcttttgttagagcagttttgaaaccctgtttccgtggaatctgccagtggacatttggagcgcattgagggctatggtggagaaggaaatatcttcacataaaaactagaaagaagcattctcagaaacatctatgtgaagtatgcattcaactcacagagttgaaccttccttttgatagaagagttttgaaacactcttttgtacaattgcaggtgaatatttggagcgctttgaagcctttgttggaaatgggaatatcctcacattaaaaactagccagaagcattctcagaaacttctttgtgatgtgtgcattgaacccagagagatgaaccgttcctttgagagagcagttttgaaacgtgtttttgtaagatctgcaagtggatatttggggcgctttgagtccttaggtggaaacgggaatatcttcgaataaaaactagacagaattattctcagaatcttctttgtgatgtgggcattcaactaacacagttgaacatttcttttgacagagcagttctgaaacactctttttgtagaatccgccagtggatatttggagcgctttgagggctattgtgcaaatggaaatatcttcacctaaaaactagaccgaagcaatcccagaaactactttgtgatgtttgcattcaactcacagagttgaacctacctcttcatagggcagtttggaaaacctctttttgtagaatctgcaagtggatatttggaccactttgaggccttcataggaaacagtactatcttcacataaaaactaggtagaagcattctcagaaacttctttgtgatgtgtgaattcaactcacagagttgaaccttcctttaatagagcagttttgaaacactctttttgtagaatttgccagtagatatttggagcgctttgaggccttcgttggaaaccggaatatcttcacataaaaagtagatagagccattctcagaaacttatttgtgatatgtagattcaactcacagcgttgaacctttcttttgatagagcagttttgaaaaactcttttatcgaatctgcaagtagacatttggagtgctttgagggctgtggtcgaaaaggaaatatcttcacatagaaactagactgaagcattctcagcaacttctttgtgacgtttgcattcatctcacagtgttgaacataccttttcatagagcagttttgaaacactatttttgtagtatctgcaagtggatatttggactgctttgaggccttcattggaaacgggaatatcttcacataaacactagacagaagcattctctgaaacttctttgtgatgtgtgtattcaactcacagagttgaaccatcttttttatggagcggttttgaaacagcgtttttgtagaatcagcaagtggatattgggaacactttgaggcctctggtggaaagggaatgtcttcacataaaaactggacagaagcattctcagaaacatctttgtgatgtttgcattcaactcacagagttgatccttccttttaatagggcagttttgcaacactctttttgtagaatgcaccagtgggcttttggagcacgtcaagggctatggtgaaaaaggaaatatcttctcataaaaactagacagaagtattctgtaaaactcctttgtgatgtttgcattcaactcagaaagttgaacttctctttatatagtccagttttcaaacactatttttgtagaatctgcaagtggatactgggactgctttgaggccttcgttggaaacgggattatcttcacatagaaactagactgaaggattcttagaaacttctttgtgatgtgtgcattcaactcaccgagtggaacctcacttttgatagagcagtgttgaaagacacttgttgtagaatctgcaggtggatatttggagtgctttgaagccttccttggaaacgggaatatcttcacataaaaactagacataagcattctcagaaactcctttgtgatctgtccattcagctcacagagttgaaccttccttttgatagagcagttttgaaacactctttctgtagagtctgcaagtggatatcaggagcgctttgaggcctatggtagaaaaagaaatatctgcatataaaaactagacagaagcattctgagaaacttctttgtgatgtttgcattcaactaccagagttgaaccttccttttgatagagcagttttgaaacactctttgtgtagaatctgcatgtggatatctggagcgatttgaggcctatggtcaaaaaggaaatatcttcctatgaaaaacagacaaaagcattctcagaaactacttagagatatgtgcattcaactcacagagttgaaacttttttttgatagagcagttttgaaacactctgtagaatctgaaagtggatatttggagctatttgagggctatggtggaaaagaaaatatattcccattaaactagacagaagcatcctcagaaacttctttatgatgtttgcattaaactcacagagttgaacatacctttccatagagcagttttgaaacactctttttggggaatccgcaagtggatatttggaccgctttgagacctttgctggaaatgggaatatcttcacatataaactagacagaagcattctcggaaacttcttcgtgatgtgtgcattctgctcccaaagttgaaccttccttttcataaagcagttttgaaacactcttttgtacaatctaccattggatatgtggaaggctttgatgcccatggtagaaaaggaaacatcctcatataaaatctagacagaaggattcacagaaactgctgtgtgatgtgtgcatccaaatcacggagttgaacttttcttttgttagagcagttttgaaaccctgtttccgtggaatctgccagtggacatttggagcgcattgagggctatggtggagaaggaaatatcttcacataaaaactagaaagaagcattctcagaaacatctatgtgaagtatgcattcaactcacagagttgaaccttccttttgatagaagagttttgaaacactcttttgtacaattgcaggtgaatatttggagcgctttgaagcctttgttggaaatgggaatatcctcacattaaaaactagccagaagcattctcagaaacttctttgtgatgtgtgcattgaacccagagagatgaaccgttcctttgagagagcagttttgaaacgtgtttttgtaagatctgcaagtggatatttggggcgctttgagtccttaggtggaaacgggaatatcttcgaataaaaactagacagaattattctcagaatcttctttgtgatgtgggcattcaactaacacagttgaacatttcttttgacagagcagttctgaaacactctttttgtagaatccgccagtggatatttggagcgctttgagggctattgtgcaaatggaaatatcttcacctaaaaactagaccgaagcaatcccagaaactactttgtgatgtttgcattcaactcacagagttgaacctacctcttcatagggcagtttggaaaacctctttttgtagaatctgcaagtggatatttggaccactttgaggccttcataggaaacagtactatcttcacataaaaactaggtagaagcattctcagaaacttctttgtgatgtgtgaattcaactcacagagttgaaccttcctttaatagagcagttttgaaacactctttttgtagaatttgccagtagatatttggagcgctttgaggccttcgttggaaaccggaatatcttcacataaaaagtagatagagccattctcagaaacttttttgtgatatgtagattcaactcacagcgttgaacctttcttttgatagagcagttttgaaaaactcttttatcgaatctgcaagtagacatttggagtgctttgagggctgtggtcgaaaaggaaatatcttcacatagaaactagactgaagcattctcagcaacttctttgtgacgtttgcattcatctcacagtgttgaacataccttttcatagagcagttttgaaacactatttttgtagtatctgcaagtggatatttggactgctttgaggccttcattggaaacgggaatatcttcacataaacactagacagaagcattctctgaaacttctttgtgatgtgtgtattcaactcacagagttgaaccatcttttttatggagcggttttgaaacagcgtttttgtagaatcagcaagtggatattgggaacactttgaggcctctggtggaaagggaatgtcttcacataaaaactggacagaagcattctcagaaacatctttgtgatgtttgcattcaactcacagagttgatccttccttttaatagggcagttttgcaacactctttttgtagaatgcaccagtgggcttttggagcacgtcaagggctatggtgaaaaaggaaatatcttctcataaaaactagactgaagtattctgtaaaactcctttgtgatgtttgcattcaactcagaaagttgaacttctctttatatagtccagttttcaaacactatttttgtagaatctgcaagtggatactgggactgctttgaggccttcgttggaaacgggattatcttcacataaaaactagactgaaggattcttagaaacttctttgtgatgtgtgcattcaactcaccgagtggaacctcacttttgatagagcagtgttgaaagacacttgttgtagaatctgcaggtggatatttggagtgctttgaagccttccttggaaacgggaatatcttcacataaaaactagacataagcattctcagaaactcctttgtgatctgtccattcagctcacagagttgaaccttccttttgatagagcagttttgaaacactctttctgtagagtctgcaagtggatatcaggagcgctttgaggcctatggtagaaaaagaaatatctgcatataaaaactagacagaagcattctgagaaacttctttgtgatgtttgcattcaactaccagagttgaaccttccttttgatagagcagttttgaaacactctttgtgtagaatctgcatgtggatatctggagcgatttgaggcctatggtcaaaaaggaaatatcttcctatgaaaaacagacaaaagcattctcagaaactacttagagatatgtgcattcaactcacagagttgaaacttttttttgatagagcagttttgaaacactctgtagaatctgaaagtggatatttggagctatttgagggctatggtggaaaagaaaatatattcccattaaactagacagaagcatcctcagaaacttctttatgatgtttgcattaaactcacagagttgaacatacctttccatagagcagttttgaaacactctttttggggaatccgcaagtggatatttggaccgctttgagacctttgctggaaatgggaatatcttcacatataaactagacagaagcattctcggaaacttcttcgtgatgtgtgcattctgctcccaaagttgaaccttccttttcataaagcagttttgaaacactcttttgtacaatctaccattggatatgtggaaggctttgatgcccatggtagaaatggaaacatcctcatataaaatctagacagaaggattcacagaaactgctgtgtgatgtgtgcatccaaatcacggagttgaacttttcttttgttagagcagttttgaaaccctgtttccgtggaatctgccagtggacatttggagcgcattgagggctatggtggagaaggaaatatcttcacataaaaactagaaagaagcattctcagaaacatctatgtgaagtatgcattcaactcacagagttgaaccttccttttgatagaagagttttgaaacactcttttgtacaattgcaggtgaatatttggagcgctttgaagcctttgttggaaatgggaatatcctcacattaaaaactagccagaagcattctcagaaacttctttgtgatgtgtgcattgaacccagagagatgaaccgttcctttgagagagcagttttgaaacgtgtttttgtaagatctgcaagtggatatttggggcgctttgagtccttaggtggaaacgggaatatcttcgaataaaaactagacagaattattctcagaatcttctttgtgatgtgggcattcaactaacacagttgaacatttcttttgacagagcagttctgaaacactctttttgtagaatccgccagtggatatttggagcgctttgagggctattgtgcaaatggaaatatcttcacctaaaaactagaccgaagcaatcccagaaactactttgtgatgtttgcattcaactcacagagttgaacctacctcttcatagggcagtttggaaaacctctttttgtagaatctgcaagtggatatttggaccactttgaggccttcataggaaacagtactatcttcacataaaaactaggtagaagcattctcagaaacttctttgtgatgtgtgaattcaactcacagagttgaaccttcctttaatagagcagttttgaaacactctttttgtagaatctgccagtagatatttggagcgctttgaggccttcgttggaaaccggaatatcttcacataaaaagtagatagaggcattctcagaaacttttttgtgatatgtagattcaactcacagcgttgaacctttcttttgatagagcagttttgaaaaactcttttatcgaatctgcaagtagacatttggagtgctttgagggctgtggtcgaaaaggaaatatcttcacatagaaactagactgaagcattctcagcaacttctttgtgacgtttgcattcatctcacagtgttgaacataccttttcatagagcagttttgaaacactatttttgtagtatctgcaagtggatatttggactgctttgaggccttcattggaaacgggaatatcttcacataaacactagacagaagcattctctgaaacttctttgtgatgtgtgtattcaactcacagagttgaaccatcttttttatggagcggttttgaaacagtgtttttgtagaatcagcaagtggatattgggagcgctttgaggcctctggtggaaagggaatgtcttcacataaaaactggacagaagtattctcagaaacatctttgtgatgtttgcattcaactcacagagttgatccttccttttaatagggcagttttgcaacactctttttgtagaatgcaccagtgggcttttggagcacgtcaagggctatggtgaaaaaggaaatatcttcacataaaaactagacagaagtattctgtaaaactcctttgtgatgtttgcattcaactcagaaagttgaacttctctttatatagtccagttttcaaacactatttttgtagcatctgcaagtggatactgggactgctttgaggccttcgttggaaacgggattaccttcacatagaaactagactgaaggattcttagaaacttctttgtgatgtgtgcattcaactcaccgagtggaacctcacttttgatagagcagtgttgaaagacacttgttgtagaatctgcaggtggatatttggagtgctttgaagacttccttggaaacgggaatatcttcacataaaaactagacataagcattctcagaaacccctttgtgatctgtccattcagctcacagagttgaaccttccttttgatagagcagttttgaaacactctttctgtagagtctgcaagtggatatcaggagcgctttgaggcctatggtagaaaaagaaatatctgcatataaaaactagacagaagcattctgagaaacttctttgtgatgtttgcattcaactaccagagttgaaccttccttttgatagagcagttttgaaacactctttgtgtagaatctgcatgtggatatctggagcgatttgaggcctatggtcagaaaggaaatatcttcctatgaaaaacagacaaaagcattctcagaaactactttgagatatgtgcattcaactcacagagttgaaacttttttttgatagaggagttttgaaacactctgtagaatctgaaagtggatatttggagctatttgagggctatggtggaaaagaaaatatattcccattaaactagacagaagcatcctcagaaacttctttatgatgtttgcattaaactcacagagttgaacatacctttccatagagcagttttgaaacactctttttggggaatccgcaagtggatatttggaccgctttgagacctttgctggaaatgggaatatcttcacatataaactagacagaagcattctcggaaacttcttcgtgatgtctgcattctgctcccaaagttgaaccttccttttcataaagcagttttgaaacactcttttgtacaatctaccattggatatgtggaaggctttgatgcccatggtagaaaaggatacatcctcatataaaatctagacagaaggattcacagaaactgctgtgtgatgtgtgcatccaaatcacggagttgaacttttcttttgttagagcagttttgaaaccctgtttccgtggaatctgccagtggacatttggagcgcattgagggctatggtggagaaggaaatatcttcacataaaaactagaaagaagcattctcagaaacatctatgtgaagtgtgcattcaactcacagagttgaaccttccttttgatagaagagttttgaaacactcttttgtacaattgcaggtgaatatttggagcgctttgaagcctttgttggaaatgggaatatcctcacataaaaactagccagaagcattctcagaaacttctttgtgatgtgtgcattgaacccagagagatgaaccgttcctttgagagagcagttttgaaacgtgtttttgtaagatctgcaagtggatatttggggcgctttgagtccttaggtggaaacgggaatatcttcgaataaaaactagacagaatgattctcagaatcttctttgtgatgtgggcattcaactaacacagttgaacatttcttttgacagagcagttctgaaacactctttttgtagaatccgccagtggatatttggagcgctttgagggctattgtgcaaatggaaatatcttcacctaaaaactagaccgaagcaatcccagaaactactttgtgatgtttgcattcaactcacagagttgaacctacctcttcatagagcagtttggaaaacctctttttgtagaatctgcaagtggatatttggaccacattgaggccttcataggaaacagtactatcttcacataaaaactaggtagaagcattgtcagaaacttctttgtgatgtgtgaattcaactcacagagttgaaccttcctttaatagagcagttttgaaacactctttttgtagaatctgccagtagatatttggagcgctttgaggccttcgttggaaaccggaatatcttcacataaaaagtagatagaggcattctcagaaacttttttgtgatatgtagattcaactcacagcgctgaacctttcttttgatagagcagttttgaaaaactcttttatcgaatctgcaagtagacatttggagtgctttgagggctgtggtcgaaaaggaaatatcttcacatagaaactagactgaagcattctcagcaacttctttgtgacctttgcattcatctcacagtgttgaacataccttttcatagagcagttttgaaacactatttttgtagtatatgcaagtggatatttggactgctttgaggccttcattggaaacgggaatatcttcacataaacactagacagaagcattctctgaaacttctttgtgatgtgtgtattcaactcacagagatgaaccatcttttttatggagcggttttgaaacagtgtttttgtagaatcagcaagtggatattgggagcgctttgaggcctctggtggaaagggaatgtcttcacataaaaactggacagaagcattctcagaaacatctttgtgatgtttgcattcaactcacagagttgatccttccttttaatagggcagttttgcaacactctttttgtagaatgcaccagtgggcttttggagcacgtcaagggctatggtgaaaaaggaaatatcttcacataaaaactagacagaagtattgtgtaaaactcctttgtgatgtttgcattcaactcagaaagttgaacttctctttatatagtccagttttcaaacactatttttgtagaatctgcaagtggatagtgggactgctttgaggccttcattggaaacgggattatcttcacataaaaactagacataagcattctcagaaactcctttgtgatctgtccattcagctcacagagttgaaccttccttttgatagagcagttttgaaacactctttctgtagagtctgcaagtggatatcaggagtgctttgtggcctatggtagaaaaagaaatatctgcatataaaaactagacagaagcattctgagaaacttctttgtgatgtttgcattcaactaccagagttgaaccttccttttgatagagcagttttgaaacactctttgtgtagaatctgcatgtggatatctggagcgatttgaggcctatggtcaaaaaggaaatatcttcctatgaaaaacagacaaaagcattctcagaaactactttgagatatgtgcattcaactcacagagttgaaacttttttttgatagagcagttttgaaacactctgtagaatctgaaagtggatatttggagctatttgagggctatggtggaaaagaaaatatattcccattaaactagacagaagcatcctcagaaacttctttatgatgtttgcattaaactcacagagttgaacatacctttccatagagcagttttgaaacactctttttggggaatccgcaagtggatatttggaccgctttgagacctttgctggaaatgggaatatcttcacatataaactagacagaagcattctcggaaacttcttcctgatgtgtgcattctgctcccaaagttgaaccttcctcttcataaagcagttttgaaacactcttttgtacaatctaccattggatatgtggaaggctttgatgcccatggtagaaaaggatacatcctcatataaaatctagacagaaggattcacagaaactgctgtgtgatgtgtgcatccaaatcatggagttgaacttttcttttgttagagcagttttgaaaccctgtttccgtggaatctgccagtggacatttggagcacattgagggctatggtggagaaggaaatatcttcacataaaaactagaaagaagcattctcagaaacatctatgtgaagtgtgcattcaactcacagagttgaaccttcgttttgatagaagagttttgaaacactcttttgtacaattgcaggtgaatatttggagcgctttgaagcctttgttggaaatgggaatatcctcacataaaaactagccagaaacattctcagaaacttctttgtgatgtgtgcattgaacccagagagatgaaccgttcctttgagagagcagttttgaaacgtgtttttgtaagatctgcaagtggatatttggggcgctttgagtccttaggtggaaacgggaatatcttcgaataaaaactagacagaatgattctcagaatcttctttgtgatgtgggcattcaacaaacacagttgaacatgtcttttgacagagcagttctgaaacactctttttgtagaatccgccagtggatatttggagcgctttgagggctattgtgcaaatggaaatatcttcacctaaaaactagaccgaagcaatcccagaaactactttgtgatgtttgcattaaactcatagagttgaacctacctcttcatagagcagtttggaaaacctctttttgtagaatctgcaagtggatatttggaccactttgaggccttcataggaaacagtactatcttcacataaaaactaggtagaagcattgtcagaaagttctttgtgatgtgtgaattcaactcacagagttgaaccttcctttaatagagcagttttgaaacactctttttgtagaatctgcaagtagatatttggagcgctttcaggccttcgttggaaaccggaatatcttcacataaaaagtagatagaggcattctcagaaacttttttgtgatatgtagattcaactcacagcgctgaacctttcttttgatagagcagttttgaaaaactcttttatcgaatctgcaagtagacatttggagtgctttgagggctgtggtcgaaaaggaaatatcttcacatagaaactagactgaagcattctcagcaacttctttgtgacgtttgcattcatctcacagtgttgaacataccttttcatagagcagttttgaaacactatttttgtagtatctgcaagtggatatttggactgctttgaggccttcattggaaacgggaatatcttcacataaacactagacagaagcattctctgaaacttctttgtgatgtgtgtattcaactcacagagttgaaccatcttttttatggagcggttttgaaacagtgtttttgtagaatcagcaattggatatttggagcgctttgaggcctctggtgtaaagggaatgtcttcacataaaaactggacagaagcattctcagaaacatctttgtgatgtttgcattcaactcacagagttgatccttccttttaatagggcagttttgcaacactctttttgtagaatgcaccagcgggcttttggagcacgtcaagggctatggtgaaaaaggaaatatcttcacaaaaaaccagacagaagtattctgtaaaactcctttgtgatgtttgcattcaactcagaaagttgaacttctctttatatagtccagttttcaaacactatttttgtagaatctgcaagtggatactgggactgctttgaggccttcgttggaaacgggattatcttcacatagaaactagactgaaggattcttagaaacttctttttgatgtgtgcattcaactcaccgagtggaacctcacttttgatagagcagtgttgaaagacacttgttgtagaatctgcaggtggatatttggagtgctttgaagccttccttggaaacgggaatatcttcacataaaaactagacataagcattctcagaaactcctttgtgatctgtccattcagctcacagagttgaaccttccttttgatagagcagttttgaaacactctttctgtagagtctgcaagtggatatcaggagcgctttgaggcctatggtagaaaaagaaatatctgcatataaaaactagacagaagcattctgagaaacttctttgtgatgtttgcattcaactaccagagttgaaccttccttttgatagagcagttttgaaacactctttgtgtagaatctgcatgtggatatctggagcgatttgaggcctatggtcaaaaaggaaatatcttcctatgaaaaacagacaaaagaattctcagaaactacttagagatatgtgcattcaactcacagagttgaaacttttttttgatagagcagttttgaaacactctgtagaatctgaaagtggatatttggagctatttgagggctatggtggaaaagaaaatatattcccattaaactagacagaagcatcctcagaaacttctttatgatgtttgcattaaactcacagagttgaacatacctttccatagagcagttttgaaacactctttttggggaatccgcaagtggatatttggaccgctttgagacctttgctggaaatgggaatatcttcacatataaactagacagaagcattcttggaaacttcttcgtgatgtgtgcattctgctcccaaagttgaaccttccttttcataaagcagttttgaaacactcttttgtacaatctaccattggatatgtggaaggctttgatgaccatggtagaaaaggaaagatcctcatataaaatctagacagaaggattcacagaaactgctgtgtgatgtgtgcatccaaatcacggagttgaacttttcttttgttagagcagttttgaaaccctgtttccgtggaatctgccagtggacatttggagcgcattgagggctatggtggagaaggaaatatcttcacataaaaactagaaagaagcattctcagaaacatctatgtgaagtgtgcattcaactcacagagttgaaccttccttttgatagaagagttttgaaacactcttttgtacaattgcaggtgaatatttggagcgctttgaagcctttgttggaaatgggaatatcctcacataaaaactagccagaagcattctcagaaacttctttgtgatgtgtgcattgaacccagagagatgaaccgttcctttgagagagcagttttgaaacgtgtttttgtaagatctgcaagtggatattaggggcgctttgagtccttaggtggaaacgggaatatcttcgaataaaaactagacagaattattctcagaatcttctttgtgatgtgggcattcaactaacacagttgaacatttcttttgacagagcagttctgaaacactctttttgtagaatccgccagtggatatttggagcgctttgagggctattgtgcaaacggaaatatcttcacctaaaaactagaccgaagcaatcccagaaactactttgtgatgtttgcattcaactcacagagttgaacctacctcttcatagagcagtttggaaaacctctttttgtagaatctgcaagtggatatttggaccactttgaggccttcataggaaacagtactatcttcacataaaaactaggtagaagcattctcagaaacttctttgtgatgtgtgaattcaactcacagagttgaaccttcctttaatagagcagttttgaaacactctttttgtagaatctgccagtagatatttggagcgctttgaggccttcgttggaaaccggaatatcttcacataaaaagtagatagaggcattctcagaaacttttttgtgatatgtagattcaactcacagcgctgaacctttcttttgatagagcagttttgaaaaactcttttatcgaatctgcaagtagacatttggagtgctttgagggctgtggtcgaaaaggaaatatcttcacatagaaactagactgaagcattctcagcaacttctttgtgacgtttgcattcatctcacagtgttgaacataccttttcatagagcagttttgaaacactatttttgtagtatctgcaagtggatatttggactgctttgaggccttcattggaaacgggaatatcttcacataaacactagacagaagcattctctgaaacttctttgtgatgtgtgtattcaactcacagagttgaaccatcttttttatggagcggttttgaaacagtgtttttgtagaatcagcaagtggatattgggagcgctttgaggcctctggtggaaagggaatgtcttcacataaaaactggacagaagcattctcagaaacatctttgtgatgtttgcattcaactcacagagttgatccttccttttaatagggcagttttgcaacactctttttgtagaatgcaccagtgggcttttggagcacgtcaagggctatggtgaaaaaggaaatatcttcacataaaaactagacagaagtattctgtaaaactcctttgtgatgtttgcattcaactcagaaagttgaacttctctttatatagtccagttttcaaacactatttttgtagaatctgcaagtggatactgggactgctttgaggccttcgttggaaacgggattatcttcacatagaaactagactgaaggattcttagaaacttctttgtgatgtgtgcattcaactcaccgagtggaacctcacttttgatagagcagtgttgaaagacacttgttgtagaatctgcaggtggatatttggagtgctttgaagccttccttggaaacgggaatatcttcacataaaaactagacataagcattctcagaaactcctttgtgatctgtccattcagctcacagagttgaaccttccttttgatagagcagttttgaaacactctttctgtagagtctgcaagtggatatcaggagcgctttgaggcctatggtagaaaaagaaatatctgcatataaaaactagacagaagcattctgagaaacttctttgtgatgtttgcattcaactaccagagttgaaccttccttttgatagagcagttttgaaacactctttgtgtagaatctgcatgtggatatctggagcgatttgaggcctatggtcaaaaaggaaatatcttcctatgaaaaacagacaaaagcattctcagaaactactttgagatatgtgcattcaactcacagagttgaaacttttttttgatagagcagttttgaaacactctgtagaatctgaaagtggatatttggagctatttgagggctatggtggaaaagaaaatatattcccattaaactagacagaagcatcctcagaaacttctttatgatgtttgcattaaactcacagagttgaacatacctttccatagagcagttttgaaacactctttttggggaatccgcaagtggatatttggactgctttgagacctttgctggaaatgggaatatcttcacatataaactagacagaagcattctcggaaacttcttcgtgatgtgtgcattctgctcccaaagttgaaccttccttttcataaagcagttttgaaacactcttttgtacaatctaccattggatatgtggaaggctttgatgcccatggtagaaaaggaaacatcctcatataaaatctagacagaaggattcacagaaactgctgtgtgatgtgtgcatccaaatcacggagttgaacttttcttttgttagagcagttttgaaaccctgtttccgtggaatctgccagtggacatttggagcgcattgagggctatggtggagaaggaaatatcttcacataaaaactagaaagaagcattctcagaaacatctatgtgaagtgtgcattcaactcacagagttgaaccttccttttgatagaagagttttgaaacactcttttgtacaattgcaggtgaatatttggagcgctttgaagcctttgttggaaatgggaatatcctcacataaaaactagccagaagcattctcagaaacttctttgtgatgtgtgcattgaacccagagagatgaaccgttcctttgagagagcagttttgaaacgtgtttttgtaagatctgcaagtggatattaggggcgctttgagtccttaggtggaaacgggaatatcttcgaataaaaactagacagaattattctcagaatcttctttgtgatgtgggcattcaactaacacagttgaacatttcttttgacagagcagttctgaaacactctttttgtagaatccgccagtggatatttggagcgctttgagggctattgtgcaaacggaaatatcttcacctaaaaactagaccgaagcaatcccagaaactactttgtgatgtttgcattcaactcacagagttgaacctacctcttcatagagcagtttggaaaacctctttttgtagaatctgcaagtggatatttggaccactttgaggccttcataggaaacagtactatcttcacataaaaactaggtagaagcattctcagaaacttctttgtgatgtgtgaattcaactcacagagttgaaccttcctttaatagagcagttttgaaacactctttttgtagaatctgccagtagatatttggagcgctttgaggccttcgttggaaaccggaatatcttcacataaaaagtagatagaggcattctcagaaacttttttgtgatatgtagattcaactcacagcgctgaacctttcttttgatagagcagttttgaaaaactcttttatcgaatctgcaagtagacatttggagtgctttgagggctgtggtcgaaaaggaaatatcttcacatagaaactagactgaagcattctcagcaacttctttgtgacgtttgcattcatctcacagtgttgaacataccttttcatagagcagttttgaaacactatttttgtagtatctgcaagtggatatttggactgctttgaggccttcattggaaacgggaatatcttcacataaacactagacagaagcattctctgaaacttctttgtgatgtgtgtattcaactcacagagttgaaccatcttttttatggagcggttttgaaacagtgtttttgtagaatcaacaagtggatattgggagcgctttgaggcctctggtggaaagggaatgtcttcacataaaaactggacagaagcattctcagaaacatctttgtgatgtttgcattcaactcacagagttgatccttccttttaatagggcagttttgcaacactctttttgtagaatgcaccagtgggcttttggggcacgtcaagggctatggtgaaaaaggaaatatcttcacataaaaactagacagaagtattctgtaaaactcctttgtgatgtttgcattcaactcagaaagttgaacttctctttatatagtccagttttcaaacactatttttgtagaatctgcaagtggatactgggactgctttgaggctatcgttggaaacaggattatcttcacataaaaactagactgaaggattcttagaaacttctttgtgatgtgtgcattcaactcaccgagtggaacctcacttttgatagagcagtgttgaaagacacttgttgtagaatctgcaggtggatatttggagtgctttgaagccttccttggaaacgggaatatcttcacataaaaactagacataagcattctcagaaactcctttgtgatctgtccattcagctcacagagttgaaccttccttttgatagagcagttttgaaacactctttctgtagagtctgcaagtggatatcaggagcgctttgaggcctatggtagaaaaagaaatatctgcatataaaaactagacagaagcattctgagaaacttctttgtgatgtttgcattcaactaccagagttgaaccttccttttgatagagcagttttgaaacactctttgtgtagaatctgcatgtggatatcaggagcgctttgaggcctatggcagaaaaagaaatatctggctctaaaaactagacagaagcattctgagaaacttctttgtgatgtttgcattcaactaccagagttgaaccttccttttgatagagcagttttgaaacactctttgtgtagaatctgcatgtggatatctggagcgatttgaggcctatggtcaaaaaggaaatatcttcctatgaaaaacagacaaaagcattctcagaaactacttagagatatgtgcattcaactcacagagttgaaacttttttttgatagagcagttttgaaacaatctgtagaatctgaaagtggatatttggagctatttgagggctatggtggaaaagaaaatatattcccattaaactagacagaagcatcctcagaaacttctttgtgatgtttgcattaaactcacagagttgaacatacctttccatagagcagttttgaaacactctttttggggaatccgcaagtggatatttggaccgctttgagacctttgctggaaatgggaatatcttcacatataaactagacagaagcattctcggaaacttcttcgtgatgtgtgcattctgctcccaaagttgaaccttccttttcataaagcagttttgaaacactcttttgtacaatctaccattggatatgtggaaggatttgatgcccatggtagaaaaggaaacatcctcatataaaatctagacagaaggattcacagaaactgctgtgtgatgtgtgcatccaaatcacggagttgaacttttcttttgttagagcagttttgaaaccctgtttccgtggaatctgccagtggacatttggagcgcattgagggctatggtggagaaggaaatatcttcacataaaaactagaaagaagcattctcagaaacatctatgtgaagtgtgcattcaactcacagagttgaaccttccttttgatagaagagttttgaaacactcttttgtacaattgcaggtgaatatttggagcgctttgaagcctttgttggaaatgggaatatcctcacataaaaactagccagaagcattctcagaaacttctttgtgatgtgtgcattgaacccagagagatgaaccgttcctttgagagagcagttttgaaacgtgtttttgtaagatctgcaagtggatattaggggcgctttgagtccttaggtggaaacgggaatatcttcgaataaaaactagacagaattattctcagaatcttctttgtgatgtgggcattcaactaacacagttgaacatttcttttgacagagcagttctgaaacactctttttgtagaatccgccagtggatatttggagcgctttgagggctattgtgcaaatggaaatatcttcacctaaaaactagaccgaagcaatcccagaaactactttgtgatgtttgcattcaactcacagagttgaacctacctcttcatagagcagtttggaaaacctctttttgtagaatctgcaagtggatatttggaccactttgaggccttcataggaaacagtactatcttcacataaaaactaggtagaagcattctcagaaacttctttgtgatgtgtgaattcaactcacagtgttgaaccttcctttaatagagcagttttgaaacactctttttgtagaatctgccagtagatatttggagcgctttgaggccttcgttggaaaccggaatatcttcacataaaaagtagatagaggcattctcagaaacttttttgtgatatgtagattcaactcacagcgctgaacctttcttttgatagagcagttttgaaaaactcttttatcgaatctgcaagtagacatttggagtgctttgagggctgtggtcgaaaaggaaatatcttcacatagaaactagactgaagcattctcagcaacttctttgtgacgtttgcattcatctcacagtgttgaacataccttttcatagagcagttttgaaacactatttttgtagtatctgcaagtggatatttggactgctttgaggccttcattggaaacgggaatatcttcacataaacactagacagaagcattctctgaaacttctttgtgatgtgtgtattcaactcacagagttgaaccatcttttttatggagcggttttgaaacagtgttttttgtagaatcagcaattggatattgggagcgctttgaggcctctggtggaaagggaatgtcttcacataaaaactggacagaagcattctcagaaacatctttgtgatgtttgcattcaactcacagagttgatccttccttttaatagggcagttttgcaacactctttttgtagaatgcaccagtgggcttttggggcacgtcaagggctatggtgaaaaaggaaatatcttcacataaaaactagacagaagtattctgtaaaactcctttgtgatgtttgcattcaactcagaaagttgaacttctctttatatagtccagttttcaaacactatttttgtagaatctgcaagtggatactgggactgctttgaggctatcgttggaaacaggattatcttcacataaaaactagactgaaggattcttagaaacttctttgtgatgtgtgcattcaactcaccgagtggaacctcacttttgatagagcagtgttgaaagacacttgttgtagaatctgcaggtggatatttggagtgctttgaagccttccttggaaacgggaatatcttcacataaaaactagacataagcattctcagaaactcctttgtgatctgtccattcagctcacagagttgaaccttccttttgatagagcagttttgaaacactctttctgtagagtctgcaagtggatatcaggagcgctttgaggcctatggtagaaaaagaaatatctgcatataaaaactagacagaagcattctgagaaacttctttgtgatgtttgcattcaactaccagagttgaaccttccttttgatagagcagttttgaaacactctttgtgtagaatctgcatgtggatatcaggagcgctttgaggcctatggcagaaaaagaaatatctggctctaaaaactagacagaagcattctgagaaacttctttgtgatgtttgcattcaactaccagagttgaaccttccttttgatagagcagttttgaaacactctttgtgtagaatctgcatgtggatatctggagcgatttgaggcctatggtcaaaaaggaaatatcttcctatgaaaaacagacaaaagcattctcagaaactacttagagatatgtgcattcaactcacagagttgaaacttttttttgatagagcagttttgaaacaatctgtagaatctgaaagtggatatttggagctatttgagggctatggtggaaaagaaaatatattcccattaaactagacagaagcatcctcagaaacttctttgtgatgtttgcattaaactcacagagttgaacatacctttccatagagcagttttgaaacactctttttggggaatccgcaagtggatatttggaccgctttgagacctttgctggaaatgggaatatcttcacatataaactagacagaagcattcttggaaacttcttcgtgatgtgtgcattctgctcccaaagttgaaccttccttttcataaagcagttttgaaacactcttttgtacaatctaccattggatatgtggaaggctttgatgcccatggtagaaaaggaaagatcctcatataaaatctagacagaaggattcacagaaactgctgtgtgatgtgtgcatccaaatcacggagttgaacttttcttttgttagagcagttttgaaaccctgtttccgtggaatctgccagtggacatttggagcgcattgagggctatggtggagaaggaaatatcttcacataaaaactagaaagaagcattctcagaaacatctatgtgaagtgtgcattcaactcacagagttgaaccttccttttgatagaagagttttgaaacactcttttgtacaattgcaggtgaatatttggagcgctttgaagcctttgttggaaatgggaatatcctcacataaaaactagccagaagcattctcagaaacttctttgtgatgtgtgcattgaacccagagagatgaaccgttcctttgagagagcagttttgaaacgtgtttttgtaagatctgcaagtggatattaggggcgctttgagtccttaggtggaaacgggaatatcttcgaataaaaactagacagaattattctcagaatcttctttgtgatgtgggcattcaactaacacagttgaacatttcttttgacagagcagttctgaaacactctttttgtagaatccgccagtggatatttggagcgctttgagggctattgtgcaaatggaaatatcttcacctaaaaactagaccgaagcaatcccagaaactactttgtgatgtttgcattcaactcacagagttgaacctacctcttcatagagcagtttggaaaacctctttttgtagaatctgcaagtggatatttggaccactttgaggccttcataggaaacagtactatcttcacataaaaactaggtagaagcattctcagaaacttctttgtgatgtgtgaattcnnnnnnnnnnnnnnnnnnnnnnnnnnnnnnnnnnnnnnnnnnnnnnnnnnnnnnnnnnnnnnnnnnnnnnnnnnnnnnnnnnnnnnnnnnnnnnnnnnnnnnnnnnnnnnnnnnnnnnnnnnnnnnnnnnnnnnnnnnnnnnnnnnnnnnnnnnnnnnnnnnnnnnnnnnnnnnnnnnnnnnnnnnnnnnnnnnnnnnnnnnnnnnnnnnnnnnnnnnnnnnnnnnnnnnnnnnnnnnnnnnnnnnnnnnnnnnnnnnnnnnnnnnnnnnnnnnnnnnnnnnnnnnnnnnnnnnnnnnnnnnnnnnnnnnnnnnnnnnnnnnnnnnnnnnnnnnnnnnnnnnnnnnnnnnnnnnnnnnnnnnnnnnnnnnnnnnnnnnnnnnnnnnnnnnnnnnnnnnnnnnnnnnnnnnnnnnnnnnnnnnnnnnnnnnnnnnnnnnnnnnnnnnnnnnnnnnnnnnnnnnnnnnnnnnnnnnnnnnnnnnnnnnnnnnnnnnnnnnnnnnnnnnnnnnnnnnnnnnnnnnnnnnnnnnnnnnnnnnnnnnnnnnnnnnnnnnnnnnnnnnnnnnnnnnnnnnnnnnnnnnnnnnnnnnnnnnnnnnnnnnnnnnnnnnnnnnnnnnnnnnnnnnnnnnnnnnnnnnnnnnnnnnnnnnnnnnnnnnnnnnnnnnnnnnnnnnnnnnnnnnnnnnnnnnnnnnnnnnnnnnnnnnnnnnnnnnnnnnnnnnnnnnnnnnnnnnnnnnnnnnnnnnnnnnnnnnnnnnnnnnnnnnnnnnnnnnnnnnnnnnnnnnnnnnnnnnnnnnnnnnnnnnnnnnnnnnnnnnnnnnnnnnnnnnnnnnnnnnnnnnnnnnnnnnnnnnnnnnnnnnnnnnnnnnnnnnnnnnnnnnnnnnnnnnnnnnnnnnnnnnnnnnnnnnnnnnnnnnnnnnnnnnnnnnnnnnnnnnnnnnnnnnnnnnnnnnnnnnnnnnnnnnnnnnnnnnnnnnnnnnnnnnnnnnnnnnnnnnnnnnnnnnnnnnnnnnnnnnnnnnnnnnnnnnnnnnnnnnnnnnnnnnnnnnnnnnnnnnnnnnnnnnnnnnnnnnnnnnnnnnnnnnnnnnnnnnnnnnnnnnnnnnnnnnnnnnnnnnnnnnnnnnnnnnnnnnnnnnnnnnnnnnnnnnnnnnnnnnnnnnnnnnnnnnnnnnnnnnnnnnnnnnnnnnnnnnnnnnnnnnnnnnnnnnnnnnnnnnnnnnnnnnnnnnnnnnnnnnnnnnnnnnnnnnnnnnnnnnnnnnnnnnnnnnnnnnnnnnnnnnnnnnnnnnnnnnnnnnnnnnnnnnnnnnnnnnnnnnnnnnnnnnnnnnnnnnnnnnnnnnnnnnnnnnnnnnnnnnnnnnnnnnnnnnnnnnnnnnnnnnnnnnnnnnnnnnnnnnnnnnnnnnnnnnnnnnnnnnnnnnnnnnnnnnnnnnnnnnnnnnnnnnnnnnnnnnnnnnnnnnnnnnnnnnnnnnnnnnnnnnnnnnnnnnnnnnnnnnnnnnnnnnnnnnnnnnnnnnnnnnnnnnnnnnnnnnnnnnnnnnnnnnnnnnnnnnnnnnnnnnnnnnnnnnnnnnnnnnnnnnnnnnnnnnnnnnnnnnnnnnnnnnnnnnnnnnnnnnnnnnnnnnnnnnnnnnnnnnnnnnnnnnnnnnnnnnnnnnnnnnnnnnnnnnnnnnnnnnnnnnnnnnnnnnnnnnnnnnnnnnnnnnnnnnnnnnnnnnnnnnnnnnnnnnnnnnnnnnnnnnnnnnnnnnnnnnnnnnnnnnnnnnnnnnnnnnnnnnnnnnnnnnnnnnnnnnnnnnnnnnnnnnnnnnnnnnnnnnnnnnnnnnnnnnnnnnnnnnnnnnnnnnnnnnnnnnnnnnnnnnnnnnnnnnnnnnnnnnnnnnnnnnnnnnnnnnnnnnnnnnnnnnnnnnnnnnnnnnnnnnnnnnnnnnnnnnnnnnnnnnnnnnnnnnnnnnnnnnnnnnnnnnnnnnnnnnnnnnnnnnnnnnnnnnnnnnnnnnnnnnnnnnnnnnnnnnnnnnnnnnnnnnnnnnnnnnnnnnnnnnnnnnnnnnnnnnnnnnnnnnnnnnnnnnnnnnnnnnnnnnnnnnnnnnnnnnnnnnnnnnnnnnnnnnnnnnnnnnnnnnnnnnnnnnnnnnnnnnnnnnnnnnnnnnnnnnnnnnnnnnnnnnnnnnnnnnnnnnnnnnnnnnnnnnnnnnnnnnnnnnnnnnnnnnnnnnnnnnnnnnnnnnnnnnnnnnnnnnnnnnnnnnnnnnnnnnnnnnnnnnnnnnnnnnnnnnnnnnnnnnnnnnnnnnnnnnnnnnnnnnnnnnnnnnnnnnnnnnnnnnnnnnnnnnnnnnnnnnnnnnnnnnnnnnnnnnnnnnnnnnnnnnnnnnnnnnnnnnnnnnnnnnnnnnnnnnnnnnnnnnnnnnnnnnnnnnnnnnnnnnnnnnnnnnnnnnnnnnnnnnnnnnnnnnnnnnnnnnnnnnnnnnnnnnnnnnnnnnnnnnnnnnnnnnnnnnnnnnnnnnnnnnnnnnnnnnnnnnnnnnnnnnnnnnnnnnnnnnnnnnnnnnnnnnnnnnnnnnnnnnnnnnnnnnnnnnnnnnnnnnnnnnnnnnnnnnnnnnnnnnnnnnnnnnnnnnnnnnnnnnnnnnnnnnnnnnnnnnnnnnnnnnnnnnnnnnnnnnnnnnnnnnnnnnnnnnnnnnnnnnnnnnnnnnnnnnnnnnnnnnnnnnnnnnnnnnnnnnnnnnnnnnnnnnnnnnnnnnnnnnnnnnnnnnnnnnnnnnnnnnnnnnnnnnnnnnnnnnnnnnnnnnnnnnnnnnnnnnnnnnnnnnnnnnnnnnnnnnnnnnnnnnnnnnnnnnnnnnnnnnnnnnnnnnnnnnnnnnnnnnnnnnnnnnnnnnnnnnnnnnnnnnnnnnnnnnnnnnnnnnnnnnnnnnnnnnnnnnnnnnnnnnnnnnnnnnnnnnnnnnnnnnnnnnnnnnnnnnnnnnnnnnnnnnnnnnnnnnnnnnnnnnnnnnnnnnnnnnnnnnnnnnnnnnnnnnnnnnnnnnnnnnnnnnnnnnnnnnnnnnnnnnnnnnnnnnnnnnnnnnnnnnnnnnnnnnnnnnnnnnnnnnnnnnnnnnnnnnnnnnnnnnnnnnnnnnnnnnnnnnnnnnnnnnnnnnnnnnnnnnnnnnnnnnnnnnnnnnnnnnnnnnnnnnnnnnnnnnnnnnnnnnnnnnnnnnnnnnnnnnnnnnnnnnnnnnnnnnnnnnnnnnnnnnnnnnnnnnnnnnnnnnnnnnnnnnnnnnnnnnnnnnnnnnnnnnnnnnnnnnnnnnnnnnnnnnnnnnnnnnnnnnnnnnnnnnnnnnnnnnnnnnnnnnnnnnnnnnnnnnnnnnnnnnnnnnnnnnnnnnnnnnnnnnnnnnnnnnnnnnnnnnnnnnnnnnnnnnnnnnnnnnnnnnnnnnnnnnnnnnnnnnnnnnnnnnnnnnnnnnnnnnnnnnnnnnnnnnnnnnnnnnnnnnnnnnnnnnnnnnnnnnnnnnnnnnnnnnnnnnnnnnnnnnnnnnnnnnnnnnnnnnnnnnnnnnnnnnnnnnnnnnnnnnnnnnnnnnnnnnnnnnnnnnnnnnnnnnnnnnnnnnnnnnnnnnnnnnnnnnnnnnnnnnnnnnnnnnnnnnnnnnnnnnnnnnnnnnnnnnnnnnnnnnnnnnnnnnnnnnnnnnnnnnnnnnnnnnnnnnnnnnnnnnnnnnnnnnnnnnnnnnnnnnnnnnnnnnnnnnnnnnnnnnnnnnnnnnnnnnnnnnnnnnnnnnnnnnnnnnnnnnnnnnnnnnnnnnnnnnnnnnnnnnnnnnnnnnnnnnnnnnnnnnnnnnnnnnnnnnnnnnnnnnnnnnnnnnnnnnnnnnnnnnnnnnnnnnnnnnnnnnnnnnnnnnnnnnnnnnnnnnnnnnnnnnnnnnnnnnnnnnnnnnnnnnnnnnnnnnnnnnnnnnnnnnnnnnnnnnnnnnnnnnnnnnnnnnnnnnnnnnnnnnnnnnnnnnnnnnnnnnnnnnnnnnnnnnnnnnnnnnnnnnnnnnnnnnnnnnnnnnnnnnnnnnnnnnnnnnnnnnnnnnnnnnnnnnnnnnnnnnnnnnnnnnnnnnnnnnnnnnnnnnnnnnnnnnnnnnnnnnnnnnnnnnnnnnnnnnnnnnnnnnnnnnnnnnnnnnnnnnnnnnnnnnnnnnnnnnnnnnnnnnnnnnnnnnnnnnnnnnnnnnnnnnnnnnnnnnnnnnnnnnnnnnnnnnnnnnnnnnnnnnnnnnnnnnnnnnnnnnnnnnnnnnnnnnnnnnnnnnnnnnnnnnnnnnnnnnnnnnnnnnnnnnnnnnnnnnnnnnnnnnnnnnnnnnnnnnnnnnnnnnnnnnnnnnnnnnnnnnnnnnnnnnnnnnnnnnnnnnnnnnnnnnnnnnnnnnnnnnnnnnnnnnnnnnnnnnnnnnnnnnnnnnnnnnnnnnnnnnnnnnnnnnnnnnnnnnnnnnnnnnnnnnnnnnnnnnnnnnnnnnnnnnnnnnnnnnnnnnnnnnnnnnnnnnnnnnnnnnnnnnnnnnnnnnnnnnnnnnnnnnnnnnnnnnnnnnnnnnnnnnnnnnnnnnnnnnnnnnnnnnnnnnnnnnnnnnnnnnnnnnnnnnnnnnnnnnnnnnnnnnnnnnnnnnnnnnnnnnnnnnnnnnnnnnnnnnnnnnnnnnnnnnnnnnnnnnnnnnnnnnnnnnnnnnnnnnnnnnnnnnnnnnnnnnnnnnnnnnnnnnnnnnnnnnnnnnnnnnnnnnnnnnnnnnnnnnnnnnnnnnnnnnnnnnnnnnnnnnnnnnnnnnnnnnnnnnnnnnnnnnnnnnnnnnnnnnnnnnnnnnnnnnnnnnnnnnnnnnnnnnnnnnnnnnnnnnnnnnnnnnnnnnnnnnnnnnnnnnnnnnnnnnnnnnnnnnnnnnnnnnnnnnnnnnnnnnnnnnnnnnnnnnnnnnnnnnnnnnnnnnnnnnnnnnnnnnnnnnnnnnnnnnnnnnnnnnnnnnnnnnnnnnnnnnnnnnnnnnnnnnnnnnnnnnnnnnnnnnnnnnnnnnnnnnnnnnnnnnnnnnnnnnnnnnnnnnnnnnnnnnnnnnnnnnnnnnnnnnnnnnnnnnnnnnnnnnnnnnnnnnnnnnnnnnnnnnnnnnnnnnnnnnnnnnnnnnnnnnnnnnnnnnnnnnnnnnnnnnnnnnnnnnnnnnnnnnnnnnnnnnnnnnnnnnnnnnnnnnnnnnnnnnnnnnnnnnnnnnnnnnnnnnnnnnnnnnnnnnnnnnnnnnnnnnnnnnnnnnnnnnnnnnnnnnnnnnnnnnnnnnnnnnnnnnnnnnnnnnnnnnnnnnnnnnnnnnnnnnnnnnnnnnnnnnnnnnnnnnnnnnnnnnnnnnnnnnnnnnnnnnnnnnnnnnnnnnnnnnnnnnnnnnnnnnnnnnnnnnnnnnnnnnnnnnnnnnnnnnnnnnnnnnnnnnnnnnnnnnnnnnnnnnnnnnnnnnnnnnnnnnnnnnnnnnnnnnnnnnnnnnnnnnnnnnnnnnnnnnnnnnnnnnnnnnnnnnnnnnnnnnnnnnnnnnnnnnnnnnnnnnnnnnnnnnnnnnnnnnnnnnnnnnnnnnnnnnnnnnnnnnnnnnnnnnnnnnnnnnnnnnnnnnnnnnnnnnnnnnnnnnnnnnnnnnnnnnnnnnnnnnnnnnnnnnnnnnnnnnnnnnnnnnnnnnnnnnnnnnnnnnnnnnnnnnnnnnnnnnnnnnnnnnnnnnnnnnnnnnnnnnnnnnnnnnnnnnnnnnnnnnnnnnnnnnnnnnnnnnnnnnnnnnnnnnnnnnnnnnnnnnnnnnnnnnnnnnnnnnnnnnnnnnnnnnnnnnnnnnnnnnnnnnnnnnnnnnnnnnnnnnnnnnnnnnnnnnnnnnnnnnnnnnnnnnnnnnnnnnnnnnnnnnnnnnnnnnnnnnnnnnnnnnnnnnnnnnnnnnnnnnnnnnnnnnnnnnnnnnnnnnnnnnnnnnnnnnnnnnnnnnnnnnnnnnnnnnnnnnnnnnnnnnnnnnnnnnnnnnnnnnnnnnnnnnnnnnnnnnnnnnnnnnnnnnnnnnnnnnnnnnnnnnnnnnnnnnnnnnnnnnnnnnnnnnnnnnnnnnnnnnnnnnnnnnnnnnnnnnnnnnnnnnnnnnnnnnnnnnnnnnnnnnnnnnnnnnnnnnnnnnnnnnnnnnnnnnnnnnnnnnnnnnnnnnnnnnnnnnnnnnnnnnnnnnnnnnnnnnnnnnnnnnnnnnnnnnnnnnnnnnnnnnnnnnnnnnnnnnnnnnnnnnnnnnnnnnnnnnnnnnnnnnnnnnnnnnnnnnnnnnnnnnnnnnnnnnnnnnnnnnnnnnnnnnnnnnnnnnnnnnnnnnnnnnnnnnnnnnnnnnnnnnnnnnnnnnnnnnnnnnnnnnnnnnnnnnnnnnnnnnnnnnnnnnnnnnnnnnnnnnnnnnnnnnnnnnnnnnnnnnnnnnnnnnnnnnnnnnnnnnnnnnnnnnnnnnnnnnnnnnnnnnnnnnnnnnnnnnnnnnnnnnnnnnnnnnnnnnnnnnnnnnnnnnnnnnnnnnnnnnnnnnnnnnnnnnnnnnnnnnnnnnnnnnnnnnnnnnnnnnnnnnnnnnnnnnnnnnnnnnnnnnnnnnnnnnnnnnnnnnnnnnnnnnnnnnnnnnnnnnnnnnnnnnnnnnnnnnnnnnnnnnnnnnnnnnnnnnnnnnnnnnnnnnnnnnnnnnnnnnnnnnnnnnnnnnnnnnnnnnnnnnnnnnnnnnnnnnnnnnnnnnnnnnnnnnnnnnnnnnnnnnnnnnnnnnnnnnnnnnnnnnnnnnnnnnnnnnnnnnnnnnnnnnnnnnnnnnnnnnnnnnnnnnnnnnnnnnnnnnnnnnnnnnnnnnnnnnnnnnnnnnnnnnnnnnnnnnnnnnnnnnnnnnnnnnnnnnnnnnnnnnnnnnnnnnnnnnnnnnnnnnnnnnnnnnnnnnnnnnnnnnnnnnnnnnnnnnnnnnnnnnnnnnnnnnnnnnnnnnnnnnnnnnnnnnnnnnnnnnnnnnnnnnnnnnnnnnnnnnnnnnnnnnnnnnnnnnnnnnnnnnnnnnnnnnnnnnnnnnnnnnnnnnnnnnnnnnnnnnnnnnnnnnnnnnnnnnnnnnnnnnnnnnnnnnnnnnnnnnnnnnnnnnnnnnnnnnnnnnnnnnnnnnnnnnnnnnnnnnnnnnnnnnnnnnnnnnnnnnnnnnnnnnnnnnnnnnnnnnnnnnnnnnnnnnnnnnnnnnnnnnnnnnnnnnnnnnnnnnnnnnnnnnnnnnnnnnnnnnnnnnnnnnnnnnnnnnnnnnnnnnnnnnnnnnnnnnnnnnnnnnnnnnnnnnnnnnnnnnnnnnnnnnnnnnnnnnnnnnnnnnnnnnnnnnnnnnnnnnnnnnnnnnnnnnnnnnnnnnnnnnnnnnnnnnnnnnnnnnnnnnnnnnnnnnnnnnnnnnnnnnnnnnnnnnnnnnnnnnnnnnnnnnnnnnnnnnnnnnnnnnnnnnnnnnnnnnnnnnnnnnnnnnnnnnnnnnnnnnnnnnnnnnnnnnnnnnnnnnnnnnnnnnnnnnnnnnnnnnnnnnnnnnnnnnnnnnnnnnnnnnnnnnnnnnnnnnnnnnnnnnnnnnnnnnnnnnnnnnnnnnnnnnnnnnnnnnnnnnnnnnnnnnnnnnnnnnnnnnnnnnnnnnnnnnnnnnnnnnnnnnnnnnnnnnnnnnnnnnnnnnnnnnnnnnnnnnnnnnnnnnnnnnnnnnnnnnnnnnnnnnnnnnnnnnnnnnnnnnnnnnnnnnnnnnnnnnnnnnnnnnnnnnnnnnnnnnnnnnnnnnnnnnnnnnnnnnnnnnnnnnnnnnnnnnnnnnnnnnnnnnnnnnnnnnnnnnnnnnnnnnnnnnnnnnnnnnnnnnnnnnnnnnnnnnnnnnnnnnnnnnnnnnnnnnnnnnnnnnnnnnnnnnnnnnnnnnnnnnnnnnnnnnnnnnnnnnnnnnnnnnnnnnnnnnnnnnnnnnnnnnnnnnnnnnnnnnnnnnnnnnnnnnnnnnnnnnnnnnnnnnnnnnnnnnnnnnnnnnnnnnnnnnnnnnnnnnnnnnnnnnnnnnnnnnnnnnnnnnnnnnnnnnnnnnnnnnnnnnnnnnnnnnnnnnnnnnnnnnnnnnnnnnnnnnnnnnnnnnnnnnnnnnnnnnnnnnnnnnnnnnnnnnnnnnnnnnnnnnnnnnnnnnnnnnnnnnnnnnnnnnnnnnnnnnnnnnnnnnnnnnnnnnnnnnnnnnnnnnnnnnnnnnnnnnnnnnnnnnnnnnnnnnnnnnnnnnnnnnnnnnnnnnnnnnnnnnnnnnnnnnnnnnnnnnnnnnnnnnnnnnnnnnnnnnnnnnnnnnnnnnnnnnnnnnnnnnnnnnnnnnnnnnnnnnnnnnnnnnnnnnnnnnnnnnnnnnnnnnnnnnnnnnnnnnnnnnnnnnnnnnnnnnnnnnnnnnnnnnnnnnnnnnnnnnnnnnnnnnnnnnnnnnnnnnnnnnnnnnnnnnnnnnnnnnnnnnnnnnnnnnnnnnnnnnnnnnnnnnnnnnnnnnnnnnnnnnnnnnnnnnnnnnnnnnnnnnnnnnnnnnnnnnnnnnnnnnnnnnnnnnnnnnnnnnnnnnnnnnnnnnnnnnnnnnnnnnnnnnnnnnnnnnnnnnnnnnnnnnnnnnnnnnnnnnnnnnnnnnnnnnnnnnnnnnnnnnnnnnnnnnnnnnnnnnnnnnnnnnnnnnnnnnnnnnnnnnnnnnnnnnnnnnnnnnnnnnnnnnnnnnnnnnnnnnnnnnnnnnnnnnnnnnnnnnnnnnnnnnnnnnnnnnnnnnnnnnnnnnnnnnnnnnnnnnnnnnnnnnnnnnnnnnnnnnnnnnnnnnnnnnnnnnnnnnnnnnnnnnnnnnnnnnnnnnnnnnnnnnnnnnnnnnnnnnnnnnnnnnnnnnnnnnnnnnnnnnnnnnnnnnnnnnnnnnnnnnnnnnnnnnnnnnnnnnnnnnnnnnnnnnnnnnnnnnnnnnnnnnnnnnnnnnnnnnnnnnnnnnnnnnnnnnnnnnnnnnnnnnnnnnnnnnnnnnnnnnnnnnnnnnnnnnnnnnnnnnnnnnnnnnnnnnnnnnnnnnnnnnnnnnnnnnnnnnnnnnnnnnnnnnnnnnnnnnnnnnnnnnnnnnnnnnnnnnnnnnnnnnnnnnnnnnnnnnnnnnnnnnnnnnnnnnnnnnnnnnnnnnnnnnnnnnnnnnnnnnnnnnnnnnnnnnnnnnnnnnnnnnnnnnnnnnnnnnnnnnnnnnnnnnnnnnnnnnnnnnnnnnnnnnnnnnnnnnnnnnnnnnnnnnnnnnnnnnnnnnnnnnnnnnnnnnnnnnnnnnnnnnnnnnnnnnnnnnnnnnnnnnnnnnnnnnnnnnnnnnnnnnnnnnnnnnnnnnnnnnnnnnnnnnnnnnnnnnnnnnnnnnnnnnnnnnnnnnnnnnnnnnnnnnnnnnnnnnnnnnnnnnnnnnnnnnnnnnnnnnnnnnnnnnnnnnnnnnnnnnnnnnnnnnnnnnnnnnnnnnnnnnnnnnnnnnnnnnnnnnnnnnnnnnnnnnnnnnnnnnnnnnnnnnnnnnnnnnnnnnnnnnnnnnnnnnnnnnnnnnnnnnnnnnnnnnnnnnnnnnnnnnnnnnnnnnnnnnnnnnnnnnnnnnnnnnnnnnnnnnnnnnnnnnnnnnnnnnnnnnnnnnnnnnnnnnnnnnnnnnnnnnnnnnnnnnnnnnnnnnnnnnnnnnnnnnnnnnnnnnnnnnnnnnnnnnnnnnnnnnnnnnnnnnnnnnnnnnnnnnnnnnnnnnnnnnnnnnnnnnnnnnnnnnnnnnnnnnnnnnnnnnnnnnnnnnnnnnnnnnnnnnnnnnnnnnnnnnnnnnnnnnnnnnnnnnnnnnnnnnnnnnnnnnnnnnnnnnnnnnnnnnnnnnnnnnnnnnnnnnnnnnnnnnnnnnnnnnnnnnnnnnnnnnnnnnnnnnnnnnnnnnnnnnnnnnnnnnnnnnnnnnnnnnnnnnnnnnnnnnnnnnnnnnnnnnnnnnnnnnnnnnnnnnnnnnnnnnnnnnnnnnnnnnnnnnnnnnnnnnnnnnnnnnnnnnnnnnnnnnnnnnnnnnnnnnnnnnnnnnnnnnnnnnnnnnnnnnnnnnnnnnnnnnnnnnnnnnnnnnnnnnnnnnnnnnnnnnnnnnnnnnnnnnnnnnnnnnnnnnnnnnnnnnnnnnnnnnnnnnnnnnnnnnnnnnnnnnnnnnnnnnnnnnnnnnnnnnnnnnnnnnnnnnnnnnnnnnnnnnnnnnnnnnnnnnnnnnnnnnnnnnnnnnnnnnnnnnnnnnnnnnnnnnnnnnnnnnnnnnnnnnnnnnnnnnnnnnnnnnnnnnnnnnnnnnnnnnnnnnnnnnnnnnnnnnnnnnnnnnnnnnnnnnnnnnnnnnnnnnnnnnnnnnnnnnnnnnnnnnnnnnnnnnnnnnnnnnnnnnnnnnnnnnnnnnnnnnnnnnnnnnnnnnnnnnnnnnnnnnnnnnnnnnnnnnnnnnnnnnnnnnnnnnnnnnnnnnnnnnnnnnnnnnnnnnnnnnnnnnnnnnnnnnnnnnnnnnnnnnnnnnnnnnnnnnnnnnnnnnnnnnnnnnnnnnnnnnnnnnnnnnnnnnnnnnnnnnnnnnnnnnnnnnnnnnnnnnnnnnnnnnnnnnnnnnnnnnnnnnnnnnnnnnnnnnnnnnnnnnnnnnnnnnnnnnnnnnnnnnnnnnnnnnnnnnnnnnnnnnnnnnnnnnnnnnnnnnnnnnnnnnnnnnnnnnnnnnnnnnnnnnnnnnnnnnnnnnnnnnnnnnnnnnnnnnnnnnnnnnnnnnnnnnnnnnnnnnnnnnnnnnnnnnnnnnnnnnnnnnnnnnnnnnnnnnnnnnnnnnnnnnnnnnnnnnnnnnnnnnnnnnnnnnnnnnnnnnnnnnnnnnnnnnnnnnnnnnnnnnnnnnnnnnnnnnnnnnnnnnnnnnnnnnnnnnnnnnnnnnnnnnnnnnnnnnnnnnnnnnnnnnnnnnnnnnnnnnnnnnnnnnnnnnnnnnnnnnnnnnnnnnnnnnnnnnnnnnnnnnnnnnnnnnnnnnnnnnnnnnnnnnnnnnnnnnnnnnnnnnnnnnnnnnnnnnnnnnnnnnnnnnnnnnnnnnnnnnnnnnnnnnnnnnnnnnnnnnnnnnnnnnnnnnnnnnnnnnnnnnnnnnnnnnnnnnnnnnnnnnnnnnnnnnnnnnnnnnnnnnnnnnnnnnnnnnnnnnnnnnnnnnnnnnnnnnnnnnnnnnnnnnnnnnnnnnnnnnnnnnnnnnnnnnnnnnnnnnnnnnnnnnnnnnnnnnnnnnnnnnnnnnnnnnnnnnnnnnnnnnnnnnnnnnnnnnnnnnnnnnnnnnnnnnnnnnnnnnnnnnnnnnnnnnnnnnnnnnnnnnnnnnnnnnnnnnnnnnnnnnnnnnnnnnnnnnnnnnnnnnnnnnnnnnnnnnnnnnnnnnnnnnnnnnnnnnnnnnnnnnnnnnnnnnnnnnnnnnnnnnnnnnnnnnnnnnnnnnnnnnnnnnnnnnnnnnnnnnnnnnnnnnnnnnnnnnnnnnnnnnnnnnnnnnnnnnnnnnnnnnnnnnnnnnnnnnnnnnnnnnnnnnnnnnnnnnnnnnnnnnnnnnnnnnnnnnnnnnnnnnnnnnnnnnnnnnnnnnnnnnnnnnnnnnnnnnnnnnnnnnnnnnnnnnnnnnnnnnnnnnnnnnnnnnnnnnnnnnnnnnnnnnnnnnnnnnnnnnnnnnnnnnnnnnnnnnnnnnnnnnnnnnnnnnnnnnnnnnnnnnnnnnnnnnnnnnnnnnnnnnnnnnnnnnnnnnnnnnnnnnnnnnnnnnnnnnnnnnnnnnnnnnnnnnnnnnnnnnnnnnnnnnnnnnnnnnnnnnnnnnnnnnnnnnnnnnnnnnnnnnnnnnnnnnnnnnnnnnnnnnnnnnnnnnnnnnnnnnnnnnnnnnnnnnnnnnnnnnnnnnnnnnnnnnnnnnnnnnnnnnnnnnnnnnnnnnnnnnnnnnnnnnnnnnnnnnnnnnnnnnnnnnnnnnnnnnnnnnnnnnnnnnnnnnnnnnnnnnnnnnnnnnnnnnnnnnnnnnnnnnnnnnnnnnnnnnnnnnnnnnnnnnnnnnnnnnnnnnnnnnnnnnnnnnnnnnnnnnnnnnnnnnnnnnnnnnnnnnnnnnnnnnnnnnnnnnnnnnnnnnnnnnnnnnnnnnnnnnnnnnnnnnnnnnnnnnnnnnnnnnnnnnnnnnnnnnnnnnnnnnnnnnnnnnnnnnnnnnnnnnnnnnnnnnnnnnnnnnnnnnnnnnnnnnnnnnnnnnnnnnnnnnnnnnnnnnnnnnnnnnnnnnnnnnnnnnnnnnnnnnnnnnnnnnnnnnnnnnnnnnnnnnnnnnnnnnnnnnnnnnnnnnnnnnnnnnnnnnnnnnnnnnnnnnnnnnnnnnnnnnnnnnnnnnnnnnnnnnnnnnnnnnnnnnnnnnnnnnnnnnnnnnnnnnnnnnnnnnnnnnnnnnnnnnnnnnnnnnnnnnnnnnnnnnnnnnnnnnnnnnnnnnnnnnnnnnnnnnnnnnnnnnnnnnnnnnnnnnnnnnnnnnnnnnnnnnnnnnnnnnnnnnnnnnnnnnnnnnnnnnnnnnnnnnnnnnnnnnnnnnnnnnnnnnnnnnnnnnnnnnnnnnnnnnnnnnnnnnnnnnnnnnnnnnnnnnnnnnnnnnnnnnnnnnnnnnnnnnnnnnnnnnnnnnnnnnnnnnnnnnnnnnnnnnnnnnnnnnnnnnnnnnnnnnnnnnnnnnnnnnnnnnnnnnnnnnnnnnnnnnnnnnnnnnnnnnnnnnnnnnnnnnnnnnnnnnnnnnnnnnnnnnnnnnnnnnnnnnnnnnnnnnnnnnnnnnnnnnnnnnnnnnnnnnnnnnnnnnnnnnnnnnnnnnnnnnnnnnnnnnnnnnnnnnnnnnnnnnnnnnnnnnnnnnnnnnnnnnnnnnnnnnnnnnnnnnnnnnnnnnnnnnnnnnnnnnnnnnnnnnnnnnnnnnnnnnnnnnnnnnnnnnnnnnnnnnnnnnnnnnnnnnnnnnnnnnnnnnnnnnnnnnnnnnnnnnnnnnnnnnnnnnnnnnnnnnnnnnnnnnnnnnnnnnnnnnnnnnnnnnnnnnnnnnnnnnnnnnnnnnnnnnnnnnnnnnnnnnnnnnnnnnnnnnnnnnnnnnnnnnnnnnnnnnnnnnnnnnnnnnnnnnnnnnnnnnnnnnnnnnnnnnnnnnnnnnnnnnnnnnnnnnnnnnnnnnnnnnnnnnnnnnnnnnnnnnnnnnnnnnnnnnnnnnnnnnnnnnnnnnnnnnnnnnnnnnnnnnnnnnnnnnnnnnnnnnnnnnnnnnnnnnnnnnnnnnnnnnnnnnnnnnnnnnnnnnnnnnnnnnnnnnnnnnnnnnnnnnnnnnnnnnnnnnnnnnnnnnnnnnnnnnnnnnnnnnnnnnnnnnnnnnnnnnnnnnnnnnnnnnnnnnnnnnnnnnnnnnnnnnnnnnnnnnnnnnnnnnnnnnnnnnnnnnnnnnnnnnnnnnnnnnnnnnnnnnnnnnnnnnnnnnnnnnnnnnnnnnnnnnnnnnnnnnnnnnnnnnnnnnnnnnnnnnnnnnnnnnnnnnnnnnnnnnnnnnnnnnnnnnnnnnnnnnnnnnnnnnnnnnnnnnnnnnnnnnnnnnnnnnnnnnnnnnnnnnnnnnnnnnnnnnnnnnnnnnnnnnnnnnnnnnnnnnnnnnnnnnnnnnnnnnnnnnnnnnnnnnnnnnnnnnnnnnnnnnnnnnnnnnnnnnnnnnnnnnnnnnnnnnnnnnnnnnnnnnnnnnnnnnnnnnnnnnnnnnnnnnnnnnnnnnnnnnnnnnnnnnnnnnnnnnnnnnnnnnnnnnnnnnnnnnnnnnnnnnnnnnnnnnnnnnnnnnnnnnnnnnnnnnnnnnnnnnnnnnnnnnnnnnnnnnnnnnnnnnnnnnnnnnnnnnnnnnnnnnnnnnnnnnnnnnnnnnnnnnnnnnnnnnnnnnnnnnnnnnnnnnnnnnnnnnnnnnnnnnnnnnnnnnnnnnnnnnnnnnnnnnnnnnnnnnnnnnnnnnnnnnnnnnnnnnnnnnnnnnnnnnnnnnnnnnnnnnnnnnnnnnnnnnnnnnnnnnnnnnnnnnnnnnnnnnnnnnnnnnnnnnnnnnnnnnnnnnnnnnnnnnnnnnnnnnnnnnnnnnnnnnnnnnnnnnnnnnnnnnnnnnnnnnnnnnnnnnnnnnnnnnnnnnnnnnnnnnnnnnnnnnnnnnnnnnnnnnnnnnnnnnnnnnnnnnnnnnnnnnnnnnnnnnnnnnnnnnnnnnnnnnnnnnnnnnnnnnnnnnnnnnnnnnnnnnnnnnnnnnnnnnnnnnnnnnnnnnnnnnnnnnnnnnnnnnnnnnnnnnnnnnnnnnnnnnnnnnnnnnnnnnnnnnnnnnnnnnnnnnnnnnnnnnnnnnnnnnnnnnnnnnnnnnnnnnnnnnnnnnnnnnnnnnnnnnnnnnnnnnnnnnnnnnnnnnnnnnnnnnnnnnnnnnnnnnnnnnnnnnnnnnnnnnnnnnnnnnnnnnnnnnnnnnnnnnnnnnnnnnnnnnnnnnnnnnnnnnnnnnnnnnnnnnnnnnnnnnnnnnnnnnnnnnnnnnnnnnnnnnnnnnnnnnnnnnnnnnnnnnnnnnnnnnnnnnnnnnnnnnnnnnnnnnnnnnnnnnnnnnnnnnnnnnnnnnnnnnnnnnnnnnnnnnnnnnnnnnnnnnnnnnnnnnnnnnnnnnnnnnnnnnnnnnnnnnnnnnnnnnnnnnnnnnnnnnnnnnnnnnnnnnnnnnnnnnnnnnnnnnnnnnnnnnnnnnnnnnnnnnnnnnnnnnnnnnnnnnnnnnnnnnnnnnnnnnnnnnnnnnnnnnnnnnnnnnnnnnnnnnnnnnnnnnnnnnnnnnnnnnnnnnnnnnnnnnnnnnnnnnnnnnnnnnnnnnnnnnnnnnnnnnnnnnnnnnnnnnnnnnnnnnnnnnnnnnnnnnnnnnnnnnnnnnnnnnnnnnnnnnnnnnnnnnnnnnnnnnnnnnnnnnnnnnnnnnnnnnnnnnnnnnnnnnnnnnnnnnnnnnnnnnnnnnnnnnnnnnnnnnnnnnnnnnnnnnnnnnnnnnnnnnnnnnnnnnnnnnnnnnnnnnnnnnnnnnnnnnnnnnnnnnnnnnnnnnnnnnnnnnnnnnnnnnnnnnnnnnnnnnnnnnnnnnnnnnnnnnnnnnnnnnnnnnnnnnnnnnnnnnnnnnnnnnnnnnnnnnnnnnnnnnnnnnnnnnnnnnnnnnnnnnnnnnnnnnnnnnnnnnnnnnnnnnnnnnnnnnnnnnnnnnnnnnnnnnnnnnnnnnnnnnnnnnnnnnnnnnnnnnnnnnnnnnnnnnnnnnnnnnnnnnnnnnnnnnnnnnnnnnnnnnnnnnnnnnnnnnnnnnnnnnnnnnnnnnnnnnnnnnnnnnnnnnnnnnnnnnnnnnnnnnnnnnnnnnnnnnnnnnnnnnnnnnnnnnnnnnnnnnnnnnnnnnnnnnnnnnnnnnnnnnnnnnnnnnnnnnnnnnnnnnnnnnnnnnnnnnnnnnnnnnnnnnnnnnnnnnnnnnnnnnnnnnnnnnnnnnnnnnnnnnnnnnnnnnnnnnnnnnnnnnnnnnnnnnnnnnnnnnnnnnnnnnnnnnnnnnnnnnnnnnnnnnnnnnnnnnnnnnnnnnnnnnnnnnnnnnnnnnnnnnnnnnnnnnnnnnnnnnnnnnnnnnnnnnnnnnnnnnnnnnnnnnnnnnnnnnnnnnnnnnnnnnnnnnnnnnnnnnnnnnnnnnnnnnnnnnnnnnnnnnnnnnnnnnnnnnnnnnnnnnnnnnnnnnnnnnnnnnnnnnnnnnnnnnnnnnnnnnnnnnnnnnnnnnnnnnnnnnnnnnnnnnnnnnnnnnnnnnnnnnnnnnnnnnnnnnnnnnnnnnnnnnnnnnnnnnnnnnnnnnnnnnnnnnnnnnnnnnnnnnnnnnnnnnnnnnnnnnnnnnnnnnnnnnnnnnnnnnnnnnnnnnnnnnnnnnnnnnnnnnnnnnnnnnnnnnnnnnnnnnnnnnnnnnnnnnnnnnnnnnnnnnnnnnnnnnnnnnnnnnnnnnnnnnnnnnnnnnnnnnnnnnnnnnnnnnnnnnnnnnnnnnnnnnnnnnnnnnnnnnnnnnnnnnnnnnnnnnnnnnnnnnnnnnnnnnnnnnnnnnnnnnnnnnnnnnnnnnnnnnnnnnnnnnnnnnnnnnnnnnnnnnnnnnnnnnnnnnnnnnnnnnnnnnnnnnnnnnnnnnnnnnnnnnnnnnnnnnnnnnnnnnnnnnnnnnnnnnnnnnnnnnnnnnnnnnnnnnnnnnnnnnnnnnnnnnnnnnnnnnnnnnnnnnnnnnnnnnnnnnnnnnnnnnnnnnnnnnnnnnnnnnnnnnnnnnnnnnnnnnnnnnnnnnnnnnnnnnnnnnnnnnnnnnnnnnnnnnnnnnnnnnnnnnnnnnnnnnnnnnnnnnnnnnnnnnnnnnnnnnnnnnnnnnnnnnnnnnnnnnnnnnnnnnnnnnnnnnnnnnnnnnnnnnnnnnnnnnnnnnnnnnnnnnnnnnnnnnnnnnnnnnnnnnnnnnnnnnnnnnnnnnnnnnnnnnnnnnnnnnnnnnnnnnnnnnnnnnnnnnnnnnnnnnnnnnnnnnnnnnnnnnnnnnnnnnnnnnnnnnnnnnnnnnnnnnnnnnnnnnnnnnnnnnnnnnnnnnnnnnnnnnnnnnnnnnnnnnnnnnnnnnnnnnnnnnnnnnnnnnnnnnnnnnnnnnnnnnnnnnnnnnnnnnnnnnnnnnnnnnnnnnnnnnnnnnnnnnnnnnnnnnnnnnnnnnnnnnnnnnnnnnnnnnnnnnnnnnnnnnnnnnnnnnnnnnnnnnnnnnnnnnnnnnnnnnnnnnnnnnnnnnnnnnnnnnnnnnnnnnnnnnnnnnnnnnnnnnnnnnnnnnnnnnnnnnnnnnnnnnnnnnnnnnnnnnnnnnnnnnnnnnnnnnnnnnnnnnnnnnnnnnnnnnnnnnnnnnnnnnnnnnnnnnnnnnnnnnnnnnnnnnnnnnnnnnnnnnnnnnnnnnnnnnnnnnnnnnnnnnnnnnnnnnnnnnnnnnnnnnnnnnnnnnnnnnnnnnnnnnnnnnnnnnnnnnnnnnnnnnnnnnnnnnnnnnnnnnnnnnnnnnnnnnnnnnnnnnnnnnnnnnnnnnnnnnnnnnnnnnnnnnnnnnnnnnnnnnnnnnnnnnnnnnnnnnnnnnnnnnnnnnnnnnnnnnnnnnnnnnnnnnnnnnnnnnnnnnnnnnnnnnnnnnnnnnnnnnnnnnnnnnnnnnnnnnnnnnnnnnnnnnnnnnnnnnnnnnnnnnnnnnnnnnnnnnnnnnnnnnnnnnnnnnnnnnnnnnnnnnnnnnnnnnnnnnnnnnnnnnnnnnnnnnnnnnnnnnnnnnnnnnnnnnnnnnnnnnnnnnnnnnnnnnnnnnnnnnnnnnnnnnnnnnnnnnnnnnnnnnnnnnnnnnnnnnnnnnnnnnnnnnnnnnnnnnnnnnnnnnnnnnnnnnnnnnnnnnnnnnnnnnnnnnnnnnnnnnnnnnnnnnnnnnnnnnnnnnnnnnnnnnnnnnnnnnnnnnnnnnnnnnnnnnnnnnnnnnnnnnnnnnnnnnnnnnnnnnnnnnnnnnnnnnnnnnnnnnnnnnnnnnnnnnnnnnnnnnnnnnnnnnnnnnnnnnnnnnnnnnnnnnnnnnnnnnnnnnnnnnnnnnnnnnnnnnnnnnnnnnnnnnnnnnnnnnnnnnnnnnnnnnnnnnnnnnnnnnnnnnnnnnnnnnnnnnnnnnnnnnnnnnnnnnnnnnnnnnnnnnnnnnnnnnnnnnnnnnnnnnnnnnnnnnnnnnnnnnnnnnnnnnnnnnnnnnnnnnnnnnnnnnnnnnnnnnnnnnnnnnnnnnnnnnnnnnnnnnnnnnnnnnnnnnnnnnnnnnnnnnnnnnnnnnnnnnnnnnnnnnnnnnnnnnnnnnnnnnnnnnnnnnnnnnnnnnnnnnnnnnnnnnnnnnnnnnnnnnnnnnnnnnnnnnnnnnnnnnnnnnnnnnnnnnnnnnnnnnnnnnnnnnnnnnnnnnnnnnnnnnnnnnnnnnnnnnnnnnnnnnnnnnnnnnnnnnnnnnnnnnnnnnnnnnnnnnnnnnnnnnnnnnnnnnnnnnnnnnnnnnnnnnnnnnnnnnnnnnnnnnnnnnnnnnnnnnnnnnnnnnnnnnnnnnnnnnnnnnnnnnnnnnnnnnnnnnnnnnnnnnnnnnnnnnnnnnnnnnnnnnnnnnnnnnnnnnnnnnnnnnnnnnnnnnnnnnnnnnnnnnnnnnnnnnnnnnnnnnnnnnnnnnnnnnnnnnnnnnnnnnnnnnnnnnnnnnnnnnnnnnnnnnnnnnnnnnnnnnnnnnnnnnnnnnnnnnnnnnnnnnnnnnnnnnnnnnnnnnnnnnnnnnnnnnnnnnnnnnnnnnnnnnnnnnnnnnnnnnnnnnnnnnnnnnnnnnnnnnnnnnnnnnnnnnnnnnnnnnnnnnnnnnnnnnnnnnnnnnnnnnnnnnnnnnnnnnnnnnnnnnnnnnnnnnnnnnnnnnnnnnnnnnnnnnnnnnnnnnnnnnnnnnnnnnnnnnnnnnnnnnnnnnnnnnnnnnnnnnnnnnnnnnnnnnnnnnnnnnnnnnnnnnnnnnnnnnnnnnnnnnnnnnnnnnnnnnnnnnnnnnnnnnnnnnnnnnnnnnnnnnnnnnnnnnnnnnnnnnnnnnnnnnnnnnnnnnnnnnnnnnnnnnnnnnnnnnnnnnnnnnnnnnnnnnnnnnnnnnnnnnnnnnnnnnnnnnnnnnnnnnnnnnnnnnnnnnnnnnnnnnnnnnnnnnnnnnnnnnnnnnnnnnnnnnnnnnnnnnnnnnnnnnnnnnnnnnnnnnnnnnnnnnnnnnnnnnnnnnnnnnnnnnnnnnnnnnnnnnnnnnnnnnnnnnnnnnnnnnnnnnnnnnnnnnnnnnnnnnnnnnnnnnnnnnnnnnnnnnnnnnnnnnnnnnnnnnnnnnnnnnnnnnnnnnnnnnnnnnnnnnnnnnnnnnnnnnnnnnnnnnnnnnnnnnnnnnnnnnnnnnnnnnnnnnnnnnnnnnnnnnnnnnnnnnnnnnnnnnnnnnnnnnnnnnnnnnnnnnnnnnnnnnnnnnnnnnnnnnnnnnnnnnnnnnnnnnnnnnnnnnnnnnnnnnnnnnnnnnnnnnnnnnnnnnnnnnnnnnnnnnnnnnnnnnnnnnnnnnnnnnnnnnnnnnnnnnnnnnnnnnnnnnnnnnnnnnnnnnnnnnnnnnnnnnnnnnnnnnnnnnnnnnnnnnnnnnnnnnnnnnnnnnnnnnnnnnnnnnnnnnnnnnnnnnnnnnnnnnnnnnnnnnnnnnnnnnnnnnnnnnnnnnnnnnnnnnnnnnnnnnnnnnnnnnnnnnnnnnnnnnnnnnnnnnnnnnnnnnnnnnnnnnnnnnnnnnnnnnnnnnnnnnnnnnnnnnnnnnnnnnnnnnnnnnnnnnnnnnnnnnnnnnnnnnnnnnnnnnnnnnnnnnnnnnnnnnnnnnnnnnnnnnnnnnnnnnnnnnnnnnnnnnnnnnnnnnnnnnnnnnnnnnnnnnnnnnnnnnnnnnnnnnnnnnnnnnnnnnnnnnnnnnnnnnnnnnnnnnnnnnnnnnnnnnnnnnnnnnnnnnnnnnnnnnnnnnnnnnnnnnnnnnnnnnnnnnnnnnnnnnnnnnnnnnnnnnnnnnnnnnnnnnnnnnnnnnnnnnnnnnnnnnnnnnnnnnnnnnnnnnnnnnnnnnnnnnnnnnnnnnnnnnnnnnnnnnnnnnnnnnnnnnnnnnnnnnnnnnnnnnnnnnnnnnnnnnnnnnnnnnnnnnnnnnnnnnnnnnnnnnnnnnnnnnnnnnnnnnnnnnnnnnnnnnnnnnnnnnnnnnnnnnnnnnnnnnnnnnnnnnnnnnnnnnnnnnnnnnnnnnnnnnnnnnnnnnnnnnnnnnnnnnnnnnnnnnnnnnnnnnnnnnnnnnnnnnnnnnnnnnnnnnnnnnnnnnnnnnnnnnnnnnnnnnnnnnnnnnnnnnnnnnnnnnnnnnnnnnnnnnnnnnnnnnnnnnnnnnnnnnnnnnnnnnnnnnnnnnnnnnnnnnnnnnnnnnnnnnnnnnnnnnnnnnnnnnnnnnnnnnnnnnnnnnnnnnnnnnnnnnnnnnnnnnnnnnnnnnnnnnnnnnnnnnnnnnnnnnnnnnnnnnnnnnnnnnnnnnnnnnnnnnnnnnnnnnnnnnnnnnnnnnnnnnnnnnnnnnnnnnnnnnnnnnnnnnnnnnnnnnnnnnnnnnnnnnnnnnnnnnnnnnnnnnnnnnnnnnnnnnnnnnnnnnnnnnnnnnnnnnnnnnnnnnnnnnnnnnnnnnnnnnnnnnnnnnnnnnnnnnnnnnnnnnnnnnnnnnnnnnnnnnnnnnnnnnnnnnnnnnnnnnnnnnnnnnnnnnnnnnnnnnnnnnnnnnnnnnnnnnnnnnnnnnnnnnnnnnnnnnnnnnnnnnnnnnnnnnnnnnnnnnnnnnnnnnnnnnnnnnnnnnnnnnnnnnnnnnnnnnnnnnnnnnnnnnnnnnnnnnnnnnnnnnnnnnnnnnnnnnnnnnnnnnnnnnnnnnnnnnnnnnnnnnnnnnnnnnnnnnnnnnnnnnnnnnnnnnnnnnnnnnnnnnnnnnnnnnnnnnnnnnnnnnnnnnnnnnnnnnnnnnnnnnnnnnnnnnnnnnnnnnnnnnnnnnnnnnnnnnnnnnnnnnnnnnnnnnnnnnnnnnnnnnnnnnnnnnnnnnnnnnnnnnnnnnnnnnnnnnnnnnnnnnnnnnnnnnnnnnnnnnnnnnnnnnnnnnnnnnnnnnnnnnnnnnnnnnnnnnnnnnnnnnnnnnnnnnnnnnnnnnnnnnnnnnnnnnnnnnnnnnnnnnnnnnnnnnnnnnnnnnnnnnnnnnnnnnnnnnnnnnnnnnnnnnnnnnnnnnnnnnnnnnnnnnnnnnnnnnnnnnnnnnnnnnnnnnnnnnnnnnnnnnnnnnnnnnnnnnnnnnnnnnnnnnnnnnnnnnnnnnnnnnnnnnnnnnnnnnnnnnnnnnnnnnnnnnnnnnnnnnnnnnnnnnnnnnnnnnnnnnnnnnnnnnnnnnnnnnnnnnnnnnnnnnnnnnnnnnnnnnnnnnnnnnnnnnnnnnnnnnnnnnnnnnnnnnnnnnnnnnnnnnnnnnnnnnnnnnnnnnnnnnnnnnnnnnnnnnnnnnnnnnnnnnnnnnnnnnnnnnnnnnnnnnnnnnnnnnnnnnnnnnnnnnnnnnnnnnnnnnnnnnnnnnnnnnnnnnnnnnnnnnnnnnnnnnnnnnnnnnnnnnnnnnnnnnnnnnnnnnnnnnnnnnnnnnnnnnnnnnnnnnnnnnnnnnnnnnnnnnnnnnnnnnnnnnnnnnnnnnnnnnnnnnnnnnnnnnnnnnnnnnnnnnnnnnnnnnnnnnnnnnnnnnnnnnnnnnnnnnnnnnnnnnnnnnnnnnnnnnnnnnnnnnnnnnnnnnnnnnnnnnnnnnnnnnnnnnnnnnnnnnnnnnnnnnnnnnnnnnnnnnnnnnnnnnnnnnnnnnnnnnnnnnnnnnnnnnnnnnnnnnnnnnnnnnnnnnnnnnnnnnnnnnnnnnnnnnnnnnnnnnnnnnnnnnnnnnnnnnnnnnnnnnnnnnnnnnnnnnnnnnnnnnnnnnnnnnnnnnnnnnnnnnnnnnnnnnnnnnnnnnnnnnnnnnnnnnnnnnnnnnnnnnnnnnnnnnnnnnnnnnnnnnnnnnnnnnnnnnnnnnnnnnnnnnnnnnnnnnnnnnnnnnnnnnnnnnnnnnnnnnnnnnnnnnnnnnnnnnnnnnnnnnnnnnnnnnnnnnnnnnnnnnnnnnnnnnnnnnnnnnnnnnnnnnnnnnnnnnnnnnnnnnnnnnnnnnnnnnnnnnnnnnnnnnnnnnnnnnnnnnnnnnnnnnnnnnnnnnnnnnnnnnnnnnnnnnnnnnnnnnnnnnnnnnnnnnnnnnnnnnnnnnnnnnnnnnnnnnnnnnnnnnnnnnnnnnnnnnnnnnnnnnnnnnnnnnnnnnnnnnnnnnnnnnnnnnnnnnnnnnnnnnnnnnnnnnnnnnnnnnnnnnnnnnnnnnnnnnnnnnnnnnnnnnnnnnnnnnnnnnnnnnnnnnnnnnnnnnnnnnnnnnnnnnnnnnnnnnnnnnnnnnnnnnnnnnnnnnnnnnnnnnnnnnnnnnnnnnnnnnnnnnnnnnnnnnnnnnnnnnnnnnnnnnnnnnnnnnnnnnnnnnnnnnnnnnnnnnnnnnnnnnnnnnnnnnnnnnnnnnnnnnnnnnnnnnnnnnnnnnnnnnnnnnnnnnnnnnnnnnnnnnnnnnnnnnnnnnnnnnnnnnnnnnnnnnnnnnnnnnnnnnnnnnnnnnnnnnnnnnnnnnnnnnnnnnnnnnnnnnnnnnnnnnnnnnnnnnnnnnnnnnnnnnnnnnnnnnnnnnnnnnnnnnnnnnnnnnnnnnnnnnnnnnnnnnnnnnnnnnnnnnnnnnnnnnnnnnnnnnnnnnnnnnnnnnnnnnnnnnnnnnnnnnnnnnnnnnnnnnnnnnnnnnnnnnnnnnnnnnnnnnnnnnnnnnnnnnnnnnnnnnnnnnnnnnnnnnnnnnnnnnnnnnnnnnnnnnnnnnnnnnnnnnnnnnnnnnnnnnnnnnnnnnnnnnnnnnnnnnnnnnnnnnnnnnnnnnnnnnnnnnnnnnnnnnnnnnnnnnnnnnnnnnnnnnnnnnnnnnnnnnnnnnnnnnnnnnnnnnnnnnnnnnnnnnnnnnnnnnnnnnnnnnnnnnnnnnnnnnnnnnnnnnnnnnnnnnnnnnnnnnnnnnnnnnnnnnnnnnnnnnnnnnnnnnnnnnnnnnnnnnnnnnnnnnnnnnnnnnnnnnnnnnnnnnnnnnnnnnnnnnnnnnnnnnnnnnnnnnnnnnnnnnnnnnnnnnnnnnnnnnnnnnnnnnnnnnnnnnnnnnnnnnnnnnnnnnnnnnnnnnnnnnnnnnnnnnnnnnnnnnnnnnnnnnnnnnnnnnnnnnnnnnnnnnnnnnnnnnnnnnnnnnnnnnnnnnnnnnnnnnnnnnnnnnnnnnnnnnnnnnnnnnnnnnnnnnnnnnnnnnnnnnnnnnnnnnnnnnnnnnnnnnnnnnnnnnnnnnnnnnnnnnnnnnnnnnnnnnnnnnnnnnnnnnnnnnnnnnnnnnnnnnnnnnnnnnnnnnnnnnnnnnnnnnnnnnnnnnnnnnnnnnnnnnnnnnnnnnnnnnnnnnnnnnnnnnnnnnnnnnnnnnnnnnnnnnnnnnnnnnnnnnnnnnnnnnnnnnnnnnnnnnnnnnnnnnnnnnnnnnnnnnnnnnnnnnnnnnnnnnnnnnnnnnnnnnnnnnnnnnnnnnnnnnnnnnnnnnnnnnnnnnnnnnnnnnnnnnnnnnnnnnnnnnnnnnnnnnnnnnnnnnnnnnnnnnnnnnnnnnnnnnnnnnnnnnnnnnnnnnnnnnnnnnnnnnnnnnnnnnnnnnnnnnnnnnnnnnnnnnnnnnnnnnnnnnnnnnnnnnnnnnnnnnnnnnnnnnnnnnnnnnnnnnnnnnnnnnnnnnnnnnnnnnnnnnnnnnnnnnnnnnnnnnnnnnnnnnnnnnnnnnnnnnnnnnnnnnnnnnnnnnnnnnnnnnnnnnnnnnnnnnnnnnnnnnnnnnnnnnnnnnnnnnnnnnnnnnnnnnnnnnnnnnnnnnnnnnnnnnnnnnnnnnnnnnnnnnnnnnnnnnnnnnnnnnnnnnnnnnnnnnnnnnnnnnnnnnnnnnnnnnnnnnnnnnnnnnnnnnnnnnnnnnnnnnnnnnnnnnnnnnnnnnnnnnnnnnnnnnnnnnnnnnnnnnnnnnnnnnnnnnnnnnnnnnnnnnnnnnnnnnnnnnnnnnnnnnnnnnnnnnnnnnnnnnnnnnnnnnnnnnnnnnnnnnnnnnnnnnnnnnnnnnnnnnnnnnnnnnnnnnnnnnnnnnnnnnnnnnnnnnnnnnnnnnnnnnnnnnnnnnnnnnnnnnnnnnnnnnnnnnnnnnnnnnnnnnnnnnnnnnnnnnnnnnnnnnnnnnnnnnnnnnnnnnnnnnnnnnnnnnnnnnnnnnnnnnnnnnnnnnnnnnnnnnnnnnnnnnnnnnnnnnnnnnnnnnnnnnnnnnnnnnnnnnnnnnnnnnnnnnnnnnnnnnnnnnnnnnnnnnnnnnnnnnnnnnnnnnnnnnnnnnnnnnnnnnnnnnnnnnnnnnnnnnnnnnnnnnnnnnnnnnnnnnnnnnnnnnnnnnnnnnnnnnnnnnnnnnnnnnnnnnnnnnnnnnnnnnnnnnnnnnnnnnnnnnnnnnnnnnnnnnnnnnnnnnnnnnnnnnnnnnnnnnnnnnnnnnnnnnnnnnnnnnnnnnnnnnnnnnnnnnnnnnnnnnnnnnnnnnnnnnnnnnnnnnnnnnnnnnnnnnnnnnnnnnnnnnnnnnnnnnnnnnnnnnnnnnnnnnnnnnnnnnnnnnnnnnnnnnnnnnnnnnnnnnnnnnnnnnnnnnnnnnnnnnnnnnnnnnnnnnnnnnnnnnnnnnnnnnnnnnnnnnnnnnnnnnnnnnnnnnnnnnnnnnnnnnnnnnnnnnnnnnnnnnnnnnnnnnnnnnnnnnnnnnnnnnnnnnnnnnnnnnnnnnnnnnnnnnnnnnnnnnnnnnnnnnnnnnnnnnnnnnnnnnnnnnnnnnnnnnnnnnnnnnnnnnnnnnnnnnnnnnnnnnnnnnnnnnnnnnnnnnnnnnnnnnnnnnnnnnnnnnnnnnnnnnnnnnnnnnnnnnnnnnnnnnnnnnnnnnnnnnnnnnnnnnnnnnnnnnnnnnnnnnnnnnnnnnnnnnnnnnnnnnnnnnnnnnnnnnnnnnnnnnnnnnnnnnnnnnnnnnnnnnnnnnnnnnnnnnnnnnnnnnnnnnnnnnnnnnnnnnnnnnnnnnnnnnnnnnnnnnnnnnnnnnnnnnnnnnnnnnnnnnnnnnnnnnnnnnnnnnnnnnnnnnnnnnnnnnnnnnnnnnnnnnnnnnnnnnnnnnnnnnnnnnnnnnnnnnnnnnnnnnnnnnnnnnnnnnnnnnnnnnnnnnnnnnnnnnnnnnnnnnnnnnnnnnnnnnnnnnnnnnnnnnnnnnnnnnnnnnnnnnnnnnnnnnnnnnnnnnnnnnnnnnnnnnnnnnnnnnnnnnnnnnnnnnnnnnnnnnnnnnnnnnnnnnnnnnnnnnnnnnnnnnnnnnnnnnnnnnnnnnnnnnnnnnnnnnnnnnnnnnnnnnnnnnnnnnnnnnnnnnnnnnnnnnnnnnnnnnnnnnnnnnnnnnnnnnnnnnnnnnnnnnnnnnnnnnnnnnnnnnnnnnnnnnnnnnnnnnnnnnnnnnnnnnnnnnnnnnnnnnnnnnnnnnnnnnnnnnnnnnnnnnnnnnnnnnnnnnnnnnnnnnnnnnnnnnnnnnnnnnnnnnnnnnnnnnnnnnnnnnnnnnnnnnnnnnnnnnnnnnnnnnnnnnnnnnnnnnnnnnnnnnnnnnnnnnnnnnnnnnnnnnnnnnnnnnnnnnnnnnnnnnnnnnnnnnnnnnnnnnnnnnnnnnnnnnnnnnnnnnnnnnnnnnnnnnnnnnnnnnnnnnnnnnnnnnnnnnnnnnnnnnnnnnnnnnnnnnnnnnnnnnnnnnnnnnnnnnnnnnnnnnnnnnnnnnnnnnnnnnnnnnnnnnnnnnnnnnnnnnnnnnnnnnnnnnnnnnnnnnnnnnnnnnnnnnnnnnnnnnnnnnnnnnnnnnnnnnnnnnnnnnnnnnnnnnnnnnnnnnnnnnnnnnnnnnnnnnnnnnnnnnnnnnnnnnnnnnnnnnnnnnnnnnnnnnnnnnnnnnnnnnnnnnnnnnnnnnnnnnnnnnnnnnnnnnnnnnnnnnnnnnnnnnnnnnnnnnnnnnnnnnnnnnnnnnnnnnnnnnnnnnnnnnnnnnnnnnnnnnnnnnnnnnnnnnnnnnnnnnnnnnnnnnnnnnnnnnnnnnnnnnnnnnnnnnnnnnnnnnnnnnnnnnnnnnnnnnnnnnnnnnnnnnnnnnnnnnnnnnnnnnnnnnnnnnnnnnnnnnnnnnnnnnnnnnnnnnnnnnnnnnnnnnnnnnnnnnnnnnnnnnnnnnnnnnnnnnnnnnnnnnnnnnnnnnnnnnnnnnnnnnnnnnnnnnnnnnnnnnnnnnnnnnnnnnnnnnnnnnnnnnnnnnnnnnnnnnnnnnnnnnnnnnnnnnnnnnnnnnnnnnnnnnnnnnnnnnnnnnnnnnnnnnnnnnnnnnnnnnnnnnnnnnnnnnnnnnnnnnnnnnnnnnnnnnnnnnnnnnnnnnnnnnnnnnnnnnnnnnnnnnnnnnnnnnnnnnnnnnnnnnnnnnnnnnnnnnnnnnnnnnnnnnnnnnnnnnnnnnnnnnnnnnnnnnnnnnnnnnnnnnnnnnnnnnnnnnnnnnnnnnnnnnnnnnnnnnnnnnnnnnnnnnnnnnnnnnnnnnnnnnnnnnnnnnnnnnnnnnnnnnnnnnnnnnnnnnnnnnnnnnnnnnnnnnnnnnnnnnnnnnnnnnnnnnnnnnnnnnnnnnnnnnnnnnnnnnnnnnnnnnnnnnnnnnnnnnnnnnnnnnnnnnnnnnnnnnnnnnnnnnnnnnnnnnnnnnnnnnnnnnnnnnnnnnnnnnnnnnnnnnnnnnnnnnnnnnnnnnnnnnnnnnnnnnnnnnnnnnnnnnnnnnnnnnnnnnnnnnnnnnnnnnnnnnnnnnnnnnnnnnnnnnnnnnnnnnnnnnnnnnnnnnnnnnnnnnnnnnnnnnnnnnnnnnnnnnnnnnnnnnnnnnnnnnnnnnnnnnnnnnnnnnnnnnnnnnnnnnnnnnnnnnnnnnnnnnnnnnnnnnnnnnnnnnnnnnnnnnnnnnnnnnnnnnnnnnnnnnnnnnnnnnnnnnnnnnnnnnnnnnnnnnnnnnnnnnnnnnnnnnnnnnnnnnnnnnnnnnnnnnnnnnnnnnnnnnnnnnnnnnnnnnnnnnnnnnnnnnnnnnnnnnnnnnnnnnnnnnnnnnnnnnnnnnnnnnnnnnnnnnnnnnnnnnnnnnnnnnnnnnnnnnnnnnnnnnnnnnnnnnnnnnnnnnnnnnnnnnnnnnnnnnnnnnnnnnnnnnnnnnnnnnnnnnnnnnnnnnnnnnnnnnnnnnnnnnnnnnnnnnnnnnnnnnnnnnnnnnnnnnnnnnnnnnnnnnnnnnnnnnnnnnnnnnnnnnnnnnnnnnnnnnnnnnnnnnnnnnnnnnnnnnnnnnnnnnnnnnnnnnnnnnnnnnnnnnnnnnnnnnnnnnnnnnnnnnnnnnnnnnnnnnnnnnnnnnnnnnnnnnnnnnnnnnnnnnnnnnnnnnnnnnnnnnnnnnnnnnnnnnnnnnnnnnnnnnnnnnnnnnnnnnnnnnnnnnnnnnnnnnnnnnnnnnnnnnnnnnnnnnnnnnnnnnnnnnnnnnnnnnnnnnnnnnnnnnnnnnnnnnnnnnnnnnnnnnnnnnnnnnnnnnnnnnnnnnnnnnnnnnnnnnnnnnnnnnnnnnnnnnnnnnnnnnnnnnnnnnnnnnnnnnnnnnnnnnnnnnnnnnnnnnnnnnnnnnnnnnnnnnnnnnnnnnnnnnnnnnnnnnnnnnnnnnnnnnnnnnnnnnnnnnnnnnnnnnnnnnnnnnnnnnnnnnnnnnnnnnnnnnnnnnnnnnnnnnnnnnnnnnnnnnnnnnnnnnnnnnnnnnnnnnnnnnnnnnnnnnnnnnnnnnnnnnnnnnnnnnnnnnnnnnnnnnnnnnnnnnnnnnnnnnnnnnnnnnnnnnnnnnnnnnnnnnnnnnnnnnnnnnnnnnnnnnnnnnnnnnnnnnnnnnnnnnnnnnnnnnnnnnnnnnnnnnnnnnnnnnnnnnnnnnnnnnnnnnnnnnnnnnnnnnnnnnnnnnnnnnnnnnnnnnnnnnnnnnnnnnnnnnnnnnnnnnnnnnnnnnnnnnnnnnnnnnnnnnnnnnnnnnnnnnnnnnnnnnnnnnnnnnnnnnnnnnnnnnnnnnnnnnnnnnnnnnnnnnnnnnnnnnnnnnnnnnnnnnnnnnnnnnnnnnnnnnnnnnnnnnnnnnnnnnnnnnnnnnnnnnnnnnnnnnnnnnnnnnnnnnnnnnnnnnnnnnnnnnnnnnnnnnnnnnnnnnnnnnnnnnnnnnnnnnnnnnnnnnnnnnnnnnnnnnnnnnnnnnnnnnnnnnnnnnnnnnnnnnnnnnnnnnnnnnnnnnnnnnnnnnnnnnnnnnnnnnnnnnnnnnnnnnnnnnnnnnnnnnnnnnnnnnnnnnnnnnnnnnnnnnnnnnnnnnnnnnnnnnnnnnnnnnnnnnnnnnnnnnnnnnnnnnnnnnnnnnnnnnnnnnnnnnnnnnnnnnnnnnnnnnnnnnnnnnnnnnnnnnnnnnnnnnnnnnnnnnnnnnnnnnnnnnnnnnnnnnnnnnnnnnnnnnnnnnnnnnnnnnnnnnnnnnnnnnnnnnnnnnnnnnnnnnnnnnnnnnnnnnnnnnnnnnnnnnnnnnnnnnnnnnnnnnnnnnnnnnnnnnnnnnnnnnnnnnnnnnnnnnnnnnnnnnnnnnnnnnnnnnnnnnnnnnnnnnnnnnnnnnnnnnnnnnnnnnnnnnnnnnnnnnnnnnnnnnnnnnnnnnnnnnnnnnnnnnnnnnnnnnnnnnnnnnnnnnnnnnnnnnnnnnnnnnnnnnnnnnnnnnnnnnnnnnnnnnnnnnnnnnnnnnnnnnnnnnnnnnnnnnnnnnnnnnnnnnnnnnnnnnnnnnnnnnnnnnnnnnnnnnnnnnnnnnnnnnnnnnnnnnnnnnnnnnnnnnnnnnnnnnnnnnnnnnnnnnnnnnnnnnnnnnnnnnnnnnnnnnnnnnnnnnnnnnnnnnnnnnnnnnnnnnnnnnnnnnnnnnnnnnnnnnnnnnnnnnnnnnnnnnnnnnnnnnnnnnnnnnnnnnnnnnnnnnnnnnnnnnnnnnnnnnnnnnnnnnnnnnnnnnnnnnnnnnnnnnnnnnnnnnnnnnnnnnnnnnnnnnnnnnnnnnnnnnnnnnnnnnnnnnnnnnnnnnnnnnnnnnnnnnnnnnnnnnnnnnnnnnnnnnnnnnnnnnnnnnnnnnnnnnnnnnnnnnnnnnnnnnnnnnnnnnnnnnnnnnnnnnnnnnnnnnnnnnnnnnnnnnnnnnnnnnnnnnnnnnnnnnnnnnnnnnnnnnnnnnnnnnnnnnnnnnnnnnnnnnnnnnnnnnnnnnnnnnnnnnnnnnnnnnnnnnnnnnnnnnnnnnnnnnnnnnnnnnnnnnnnnnnnnnnnnnnnnnnnnnnnnnnnnnnnnnnnnnnnnnnnnnnnnnnnnnnnnnnnnnnnnnnnnnnnnnnnnnnnnnnnnnnnnnnnnnnnnnnnnnnnnnnnnnnnnnnnnnnnnnnnnnnnnnnnnnnnnnnnnnnnnnnnnnnnnnnnnnnnnnnnnnnnnnnnnnnnnnnnnnnnnnnnnnnnnnnnnnnnnnnnnnnnnnnnnnnnnnnnnnnnnnnnnnnnnnnnnnnnnnnnnnnnnnnnnnnnnnnnnnnnnnnnnnnnnnnnnnnnnnnnnnnnnnnnnnnnnnnnnnnnnnnnnnnnnnnnnnnnnnnnnnnnnnnnnnnnnnnnnnnnnnnnnnnnnnnnnnnnnnnnnnnnnnnnnnnnnnnnnnnnnnnnnnnnnnnnnnnnnnnnnnnnnnnnnnnnnnnnnnnnnnnnnnnnnnnnnnnnnnnnnnnnnnnnnnnnnnnnnnnnnnnnnnnnnnnnnnnnnnnnnnnnnnnnnnnnnnnnnnnnnnnnnnnnnnnnnnnnnnnnnnnnnnnnnnnnnnnnnnnnnnnnnnnnnnnnnnnnnnnnnnnnnnnnnnnnnnnnnnnnnnnnnnnnnnnnnnnnnnnnnnnnnnnnnnnnnnnnnnnnnnnnnnnnnnnnnnnnnnnnnnnnnnnnnnnnnnnnnnnnnnnnnnnnnnnnnnnnnnnnnnnnnnnnnnnnnnnnnnnnnnnnnnnnnnnnnnnnnnnnnnnnnnnnnnnnnnnnnnnnnnnnnnnnnnnnnnnnnnnnnnnnnnnnnnnnnnnnnnnnnnnnnnnnnnnnnnnnnnnnnnnnnnnnnnnnnnnnnnnnnnnnnnnnnnnnnnnnnnnnnnnnnnnnnnnnnnnnnnnnnnnnnnnnnnnnnnnnnnnnnnnnnnnnnnnnnnnnnnnnnnnnnnnnnnnnnnnnnnnnnnnnnnnnnnnnnnnnnnnnnnnnnnnnnnnnnnnnnnnnnnnnnnnnnnnnnnnnnnnnnnnnnnnnnnnnnnnnnnnnnnnnnnnnnnnnnnnnnnnnnnnnnnnnnnnnnnnnnnnnnnnnnnnnnnnnnnnnnnnnnnnnnnnnnnnnnnnnnnnnnnnnnnnnnnnnnnnnnnnnnnnnnnnnnnnnnnnnnnnnnnnnnnnnnnnnnnnnnnnnnnnnnnnnnnnnnnnnnnnnnnnnnnnnnnnnnnnnnnnnnnnnnnnnnnnnnnnnnnnnnnnnnnnnnnnnnnnnnnnnnnnnnnnnnnnnnnnnnnnnnnnnnnnnnnnnnnnnnnnnnnnnnnnnnnnnnnnnnnnnnnnnnnnnnnnnnnnnnnnnnnnnnnnnnnnnnnnnnnnnnnnnnnnnnnnnnnnnnnnnnnnnnnnnnnnnnnnnnnnnnnnnnnnnnnnnnnnnnnnnnnnnnnnnnnnnnnnnnnnnnnnnnnnnnnnnnnnnnnnnnnnnnnnnnnnnnnnnnnnnnnnnnnnnnnnnnnnnnnnnnnnnnnnnnnnnnnnnnnnnnnnnnnnnnnnnnnnnnnnnnnnnnnnnnnnnnnnnnnnnnnnnnnnnnnnnnnnnnnnnnnnnnnnnnnnnnnnnnnnnnnnnnnnnnnnnnnnnnnnnnnnnnnnnnnnnnnnnnnnnnnnnnnnnnnnnnnnnnnnnnnnnnnnnnnnnnnnnnnnnnnnnnnnnnnnnnnnnnnnnnnnnnnnnnnnnnnnnnnnnnnnnnnnnnnnnnnnnnnnnnnnnnnnnnnnnnnnnnnnnnnnnnnnnnnnnnnnnnnnnnnnnnnnnnnnnnnnnnnnnnnnnnnnnnnnnnnnnnnnnnnnnnnnnnnnnnnnnnnnnnnnnnnnnnnnnnnnnnnnnnnnnnnnnnnnnnnnnnnnnnnnnnnnnnnnnnnnnnnnnnnnnnnnnnnnnnnnnnnnnnnnnnnnnnnnnnnnnnnnnnnnnnnnnnnnnnnnnnnnnnnnnnnnnnnnnnnnnnnnnnnnnnnnnnnnnnnnnnnnnnnnnnnnnnnnnnnnnnnnnnnnnnnnnnnnnnnnnnnnnnnnnnnnnnnnnnnnnnnnnnnnnnnnnnnnnnnnnnnnnnnnnnnnnnnnnnnnnnnnnnnnnnnnnnnnnnnnnnnnnnnnnnnnnnnnnnnnnnnnnnnnnnnnnnnnnnnnnnnnnnnnnnnnnnnnnnnnnnnnnnnnnnnnnnnnnnnnnnnnnnnnnnnnnnnnnnnnnnnnnnnnnnnnnnnnnnnnnnnnnnnnnnnnnnnnnnnnnnnnnnnnnnnnnnnnnnnnnnnnnnnnnnnnnnnnnnnnnnnnnnnnnnnnnnnnnnnnnnnnnnnnnnnnnnnnnnnnnnnnnnnnnnnnnnnnnnnnnnnnnnnnnnnnnnnnnnnnnnnnnnnnnnnnnnnnnnnnnnnnnnnnnnnnnnnnnnnnnnnnnnnnnnnnnnnnnnnnnnnnnnnnnnnnnnnnnnnnnnnnnnnnnnnnnnnnnnnnnnnnnnnnnnnnnnnnnnnnnnnnnnnnnnnnnnnnnnnnnnnnnnnnnnnnnnnnnnnnnnnnnnnnnnnnnnnnnnnnnnnnnnnnnnnnnnnnnnnnnnnnnnnnnnnnnnnnnnnnnnnnnnnnnnnnnnnnnnnnnnnnnnnnnnnnnnnnnnnnnnnnnnnnnnnnnnnnnnnnnnnnnnnnnnnnnnnnnnnnnnnnnnnnnnnnnnnnnnnnnnnnnnnnnnnnnnnnnnnnnnnnnnnnnnnnnnnnnnnnnnnnnnnnnnnnnnnnnnnnnnnnnnnnnnnnnnnnnnnnnnnnnnnnnnnnnnnnnnnnnnnnnnnnnnnnnnnnnnnnnnnnnnnnnnnnnnnnnnnnnnnnnnnnnnnnnnnnnnnnnnnnnnnnnnnnnnnnnnnnnnnnnnnnnnnnnnnnnnnnnnnnnnnnnnnnnnnnnnnnnnnnnnnnnnnnnnnnnnnnnnnnnnnnnnnnnnnnnnnnnnnnnnnnnnnnnnnnnnnnnnnnnnnnnnnnnnnnnnnnnnnnnnnnnnnnnnnnnnnnnnnnnnnnnnnnnnnnnnnnnnnnnnnnnnnnnnnnnnnnnnnnnnnnnnnnnnnnnnnnnnnnnnnnnnnnnnnnnnnnnnnnnnnnnnnnnnnnnnnnnnnnnnnnnnnnnnnnnnnnnnnnnnnnnnnnnnnnnnnnnnnnnnnnnnnnnnnnnnnnnnnnnnnnnnnnnnnnnnnnnnnnnnnnnnnnnnnnnnnnnnnnnnnnnnnnnnnnnnnnnnnnnnnnnnnnnnnnnnnnnnnnnnnnnnnnnnnnnnnnnnnnnnnnnnnnnnnnnnnnnnnnnnnnnnnnnnnnnnnnnnnnnnnnnnnnnnnnnnnnnnnnnnnnnnnnnnnnnnnnnnnnnnnnnnnnnnnnnnnnnnnnnnnnnnnnnnnnnnnnnnnnnnnnnnnnnnnnnnnnnnnnnnnnnnnnnnnnnnnnnnnnnnnnnnnnnnnnnnnnnnnnnnnnnnnnnnnnnnnnnnnnnnnnnnnnnnnnnnnnnnnnnnnnnnnnnnnnnnnnnnnnnnnnnnnnnnnnnnnnnnnnnnnnnnnnnnnnnnnnnnnnnnnnnnnnnnnnnnnnnnnnnnnnnnnnnnnnnnnnnnnnnnnnnnnnnnnnnnnnnnnnnnnnnnnnnnnnnnnnnnnnnnnnnnnnnnnnnnnnnnnnnnnnnnnnnnnnnnnnnnnnnnnnnnnnnnnnnnnnnnnnnnnnnnnnnnnnnnnnnnnnnnnnnnnnnnnnnnnnnnnnnnnnnnnnnnnnnnnnnnnnnnnnnnnnnnnnnnnnnnnnnnnnnnnnnnnnnnnnnnnnnnnnnnnnnnnnnnnnnnnnnnnnnnnnnnnnnnnnnnnnnnnnnnnnnnnnnnnnnnnnnnnnnnnnnnnnnnnnnnnnnnnnnnnnnnnnnnnnnnnnnnnnnnnnnnnnnnnnnnnnnnnnnnnnnnnnnnnnnnnnnnnnnnnnnnnnnnnnnnnnnnnnnnnnnnnnnnnnnnnnnnnnnnnnnnnnnnnnnnnnnnnnnnnnnnnnnnnnnnnnnnnnnnnnnnnnnnnnnnnnnnnnnnnnnnnnnnnnnnnnnnnnnnnnnnnnnnnnnnnnnnnnnnnnnnnnnnnnnnnnnnnnnnnnnnnnnnnnnnnnnnnnnnnnnnnnnnnnnnnnnnnnnnnnnnnnnnnnnnnnnnnnnnnnnnnnnnnnnnnnnnnnnnnnnnnnnnnnnnnnnnnnnnnnnnnnnnnnnnnnnnnnnnnnnnnnnnnnnnnnnnnnnnnnnnnnnnnnnnnnnnnnnnnnnnnnnnnnnnnnnnnnnnnnnnnnnnnnnnnnnnnnnnnnnnnnnnnnnnnnnnnnnnnnnnnnnnnnnnnnnnnnnnnnnnnnnnnnnnnnnnnnnnnnnnnnnnnnnnnnnnnnnnnnnnnnnnnnnnnnnnnnnnnnnnnnnnnnnnnnnnnnnnnnnnnnnnnnnnnnnnnnnnnnnnnnnnnnnnnnnnnnnnnnnnnnnnnnnnnnnnnnnnnnnnnnnnnnnnnnnnnnnnnnnnnnnnnnnnnnnnnnnnnnnnnnnnnnnnnnnnnnnnnnnnnnnnnnnnnnnnnnnnnnnnnnnnnnnnnnnnnnnnnnnnnnnnnnnnnnnnnnnnnnnnnnnnnnnnnnnnnnnnnnnnnnnnnnnnnnnnnnnnnnnnnnnnnnnnnnnnnnnnnnnnnnnnnnnnnnnnnnnnnnnnnnnnnnnnnnnnnnnnnnnnnnnnnnnnnnnnnnnnnnnnnnnnnnnnnnnnnnnnnnnnnnnnnnnnnnnnnnnnnnnnnnnnnnnnnnnnnnnnnnnnnnnnnnnnnnnnnnnnnnnnnnnnnnnnnnnnnnnnnnnnnnnnnnnnnnnnnnnnnnnnnnnnnnnnnnnnnnnnnnnnnnnnnnnnnnnnnnnnnnnnnnnnnnnnnnnnnnnnnnnnnnnnnnnnnnnnnnnnnnnnnnnnnnnnnnnnnnnnnnnnnnnnnnnnnnnnnnnnnnnnnnnnnnnnnnnnnnnnnnnnnnnnnnnnnnnnnnnnnnnnnnnnnnnnnnnnnnnnnnnnnnnnnnnnnnnnnnnnnnnnnnnnnnnnnnnnnnnnnnnnnnnnnnnnnnnnnnnnnnnnnnnnnnnnnnnnnnnnnnnnnnnnnnnnnnnnnnnnnnnnnnnnnnnnnnnnnnnnnnnnnnnnnnnnnnnnnnnnnnnnnnnnnnnnnnnnnnnnnnnnnnnnnnnnnnnnnnnnnnnnnnnnnnnnnnnnnnnnnnnnnnnnnnnnnnnnnnnnnnnnnnnnnnnnnnnnnnnnnnnnnnnnnnnnnnnnnnnnnnnnnnnnnnnnnnnnnnnnnnnnnnnnnnnnnnnnnnnnnnnnnnnnnnnnnnnnnnnnnnnnnnnnnnnnnnnnnnnnnnnnnnnnnnnnnnnnnnnnnnnnnnnnnnnnnnnnnnnnnnnnnnnnnnnnnnnnnnnnnnnnnnnnnnnnnnnnnnnnnnnnnnnnnnnnnnnnnnnnnnnnnnnnnnnnnnnnnnnnnnnnnnnnnnnnnnnnnnnnnnnnnnnnnnnnnnnnnnnnnnnnnnnnnnnnnnnnnnnnnnnnnnnnnnnnnnnnnnnnnnnnnnnnnnnnnnnnnnnnnnnnnnnnnnnnnnnnnnnnnnnnnnnnnnnnnnnnnnnnnnnnnnnnnnnnnnnnnnnnnnnnnnnnnnnnnnnnnnnnnnnnnnnnnnnnnnnnnnnnnnnnnnnnnnnnnnnnnnnnnnnnnnnnnnnnnnnnnnnnnnnnnnnnnnnnnnnnnnnnnnnnnnnnnnnnnnnnnnnnnnnnnnnnnnnnnnnnnnnnnnnnnnnnnnnnnnnnnnnnnnnnnnnnnnnnnnnnnnnnnnnnnnnnnnnnnnnnnnnnnnnnnnnnnnnnnnnnnnnnnnnnnnnnnnnnnnnnnnnnnnnnnnnnnnnnnnnnnnnnnnnnnnnnnnnnnnnnnnnnnnnnnnnnnnnnnnnnnnnnnnnnnnnnnnnnnnnnnnnnnnnnnnnnnnnnnnnnnnnnnnnnnnnnnnnnnnnnnnnnnnnnnnnnnnnnnnnnnnnnnnnnnnnnnnnnnnnnnnnnnnnnnnnnnnnnnnnnnnnnnnnnnnnnnnnnnnnnnnnnnnnnnnnnnnnnnnnnnnnnnnnnnnnnnnnnnnnnnnnnnnnnnnnnnnnnnnnnnnnnnnnnnnnnnnnnnnnnnnnnnnnnnnnnnnnnnnnnnnnnnnnnnnnnnnnnnnnnnnnnnnnnnnnnnnnnnnnnnnnnnnnnnnnnnnnnnnnnnnnnnnnnnnnnnnnnnnnnnnnnnnnnnnnnnnnnnnnnnnnnnnnnnnnnnnnnnnnnnnnnnnnnnnnnnnnnnnnnnnnnnnnnnnnnnnnnnnnnnnnnnnnnnnnnnnnnnnnnnnnnnnnnnnnnnnnnnnnnnnnnnnnnnnnnnnnnnnnnnnnnnnnnnnnnnnnnnnnnnnnnnnnnnnnnnnnnnnnnnnnnnnnnnnnnnnnnnnnnnnnnnnnnnnnnnnnnnnnnnnnnnnnnnnnnnnnnnnnnnnnnnnnnnnnnnnnnnnnnnnnnnnnnnnnnnnnnnnnnnnnnnnnnnnnnnnnnnnnnnnnnnnnnnnnnnnnnnnnnnnnnnnnnnnnnnnnnnnnnnnnnnnnnnnnnnnnnnnnnnnnnnnnnnnnnnnnnnnnnnnnnnnnnnnnnnnnnnnnnnnnnnnnnnnnnnnnnnnnnnnnnnnnnnnnnnnnnnnnnnnnnnnnnnnnnnnnnnnnnnnnnnnnnnnnnnnnnnnnnnnnnnnnnnnnnnnnnnnnnnnnnnnnnnnnnnnnnnnnnnnnnnnnnnnnnnnnnnnnnnnnnnnnnnnnnnnnnnnnnnnnnnnnnnnnnnnnnnnnnnnnnnnnnnnnnnnnnnnnnnnnnnnnnnnnnnnnnnnnnnnnnnnnnnnnnnnnnnnnnnnnnnnnnnnnnnnnnnnnnnnnnnnnnnnnnnnnnnnnnnnnnnnnnnnnnnnnnnnnnnnnnnnnnnnnnnnnnnnnnnnnnnnnnnnnnnnnnnnnnnnnnnnnnnnnnnnnnnnnnnnnnnnnnnnnnnnnnnnnnnnnnnnnnnnnnnnnnnnnnnnnnnnnnnnnnnnnnnnnnnnnnnnnnnnnnnnnnnnnnnnnnnnnnnnnnnnnnnnnnnnnnnnnnnnnnnnnnnnnnnnnnnnnnnnnnnnnnnnnnnnnnnnnnnnnnnnnnnnnnnnnnnnnnnnnnnnnnnnnnnnnnnnnnnnnnnnnnnnnnnnnnnnnnnnnnnnnnnnnnnnnnnnnnnnnnnnnnnnnnnnnnnnnnnnnnnnnnnnnnnnnnnnnnnnnnnnnnnnnnnnnnnnnnnnnnnnnnnnnnnnnnnnnnnnnnnnnnnnnnnnnnnnnnnnnnnnnnnnnnnnnnnnnnnnnnnnnnnnnnnnnnnnnnnnnnnnnnnnnnnnnnnnnnnnnnnnnnnnnnnnnnnnnnnnnnnnnnnnnnnnnnnnnnnnnnnnnnnnnnnnnnnnnnnnnnnnnnnnnnnnnnnnnnnnnnnnnnnnnnnnnnnnnnnnnnnnnnnnnnnnnnnnnnnnnnnnnnnnnnnnnnnnnnnnnnnnnnnnnnnnnnnnnnnnnnnnnnnnnnnnnnnnnnnnnnnnnnnnnnnnnnnnnnnnnnnnnnnnnnnnnnnnnnnnnnnnnnnnnnnnnnnnnnnnnnnnnnnnnnnnnnnnnnnnnnnnnnnnnnnnnnnnnnnnnnnnnnnnnnnnnnnnnnnnnnnnnnnnnnnnnnnnnnnnnnnnnnnnnnnnnnnnnnnnnnnnnnnnnnnnnnnnnnnnnnnnnnnnnnnnnnnnnnnnnnnnnnnnnnnnnnnnnnnnnnnnnnnnnnnnnnnnnnnnnnnnnnnnnnnnnnnnnnnnnnnnnnnnnnnnnnnnnnnnnnnnnnnnnnnnnnnnnnnnnnnnnnnnnnnnnnnnnnnnnnnnnnnnnnnnnnnnnnnnnnnnnnnnnnnnnnnnnnnnnnnnnnnnnnnnnnnnnnnnnnnnnnnnnnnnnnnnnnnnnnnnnnnnnnnnnnnnnnnnnnnnnnnnnnnnnnnnnnnnnnnnnnnnnnnnnnnnnnnnnnnnnnnnnnnnnnnnnnnnnnnnnnnnnnnnnnnnnnnnnnnnnnnnnnnnnnnnnnnnnnnnnnnnnnnnnnnnnnnnnnnnnnnnnnnnnnnnnnnnnnnnnnnnnnnnnnnnnnnnnnnnnnnnnnnnnnnnnnnnnnnnnnnnnnnnnnnnnnnnnnnnnnnnnnnnnnnnnnnnnnnnnnnnnnnnnnnnnnnnnnnnnnnnnnnnnnnnnnnnnnnnnnnnnnnnnnnnnnnnnnnnnnnnnnnnnnnnnnnnnnnnnnnnnnnnnnnnnnnnnnnnnnnnnnnnnnnnnnnnnnnnnnnnnnnnnnnnnnnnnnnnnnnnnnnnnnnnnnnnnnnnnnnnnnnnnnnnnnnnnnnnnnnnnnnnnnnnnnnnnnnnnnnnnnnnnnnnnnnnnnnnnnnnnnnnnnnnnnnnnnnnnnnnnnnnnnnnnnnnnnnnnnnnnnnnnnnnnnnnnnnnnnnnnnnnnnnnnnnnnnnnnnnnnnnnnnnnnnnnnnnnnnnnnnnnnnnnnnnnnnnnnnnnnnnnnnnnnnnnnnnnnnnnnnnnnnnnnnnnnnnnnnnnnnnnnnnnnnnnnnnnnnnnnnnnnnnnnnnnnnnnnnnnnnnnnnnnnnnnnnnnnnnnnnnnnnnnnnnnnnnnnnnnnnnnnnnnnnnnnnnnnnnnnnnnnnnnnnnnnnnnnnnnnnnnnnnnnnnnnnnnnnnnnnnnnnnnnnnnnnnnnnnnnnnnnnnnnnnnnnnnnnnnnnnnnnnnnnnnnnnnnnnnnnnnnnnnnnnnnnnnnnnnnnnnnnnnnnnnnnnnnnnnnnnnnnnnnnnnnnnnnnnnnnnnnnnnnnnnnnnnnnnnnnnnnnnnnnnnnnnnnnnnnnnnnnnnnnnnnnnnnnnnnnnnnnnnnnnnnnnnnnnnnnnnnnnnnnnnnnnnnnnnnnnnnnnnnnnnnnnnnnnnnnnnnnnnnnnnnnnnnnnnnnnnnnnnnnnnnnnnnnnnnnnnnnnnnnnnnnnnnnnnnnnnnnnnnnnnnnnnnnnnnnnnnnnnnnnnnnnnnnnnnnnnnnnnnnnnnnnnnnnnnnnnnnnnnnnnnnnnnnnnnnnnnnnnnnnnnnnnnnnnnnnnnnnnnnnnnnnnnnnnnnnnnnnnnnnnnnnnnnnnnnnnnnnnnnnnnnnnnnnnnnnnnnnnnnnnnnnnnnnnnnnnnnnnnnnnnnnnnnnnnnnnnnnnnnnnnnnnnnnnnnnnnnnnnnnnnnnnnnnnnnnnnnnnnnnnnnnnnnnnnnnnnnnnnnnnnnnnnnnnnnnnnnnnnnnnnnnnnnnnnnnnnnnnnnnnnnnnnnnnnnnnnnnnnnnnnnnnnnnnnnnnnnnnnnnnnnnnnnnnnnnnnnnnnnnnnnnnnnnnnnnnnnnnnnnnnnnnnnnnnnnnnnnnnnnnnnnnnnnnnnnnnnnnnnnnnnnnnnnnnnnnnnnnnnnnnnnnnnnnnnnnnnnnnnnnnnnnnnnnnnnnnnnnnnnnnnnnnnnnnnnnnnnnnnnnnnnnnnnnnnnnnnnnnnnnnnnnnnnnnnnnnnnnnnnnnnnnnnnnnnnnnnnnnnnnnnnnnnnnnnnnnnnnnnnnnnnnnnnnnnnnnnnnnnnnnnnnnnnnnnnnnnnnnnnnnnnnnnnnnnnnnnnnnnnnnnnnnnnnnnnnnnnnnnnnnnnnnnnnnnnnnnnnnnnnnnnnnnnnnnnnnnnnnnnnnnnnnnnnnnnnnnnnnnnnnnnnnnnnnnnnnnnnnnnnnnnnnnnnnnnnnnnnnnnnnnnnnnnnnnnnnnnnnnnnnnnnnnnnnnnnnnnnnnnnnnnnnnnnnnnnnnnnnnnnnnnnnnnnnnnnnnnnnnnnnnnnnnnnnnnnnnnnnnnnnnnnnnnnnnnnnnnnnnnnnnnnnnnnnnnnnnnnnnnnnnnnnnnnnnnnnnnnnnnnnnnnnnnnnnnnnnnnnnnnnnnnnnnnnnnnnnnnnnnnnnnnnnnnnnnnnnnnnnnnnnnnnnnnnnnnnnnnnnnnnnnnnnnnnnnnnnnnnnnnnnnnnnnnnnnnnnnnnnnnnnnnnnnnnnnnnnnnnnnnnnnnnnnnnnnnnnnnnnnnnnnnnnnnnnnnnnnnnnnnnnnnnnnnnnnnnnnnnnnnnnnnnnnnnnnnnnnnnnnnnnnnnnnnnnnnnnnnnnnnnnnnnnnnnnnnnnnnnnnnnnnnnnnnnnnnnnnnnnnnnnnnnnnnnnnnnnnnnnnnnnnnnnnnnnnnnnnnnnnnnnnnnnnnnnnnnnnnnnnnnnnnnnnnnnnnnnnnnnnnnnnnnnnnnnnnnnnnnnnnnnnnnnnnnnnnnnnnnnnnnnnnnnnnnnnnnnnnnnnnnnnnnnnnnnnnnnnnnnnnnnnnnnnnnnnnnnnnnnnnnnnnnnnnnnnnnnnnnnnnnnnnnnnnnnnnnnnnnnnnnnnnnnnnnnnnnnnnnnnnnnnnnnnnnnnnnnnnnnnnnnnnnnnnnnnnnnnnnnnnnnnnnnnnnnnnnnnnnnnnnnnnnnnnnnnnnnnnnnnnnnnnnnnnnnnnnnnnnnnnnnnnnnnnnnnnnnnnnnnnnnnnnnnnnnnnnnnnnnnnnnnnnnnnnnnnnnnnnnnnnnnnnnnnnnnnnnnnnnnnnnnnnnnnnnnnnnnnnnnnnnnnnnnnnnnnnnnnnnnnnnnnnnnnnnnnnnnnnnnnnnnnnnnnnnnnnnnnnnnnnnnnnnnnnnnnnnnnnnnnnnnnnnnnnnnnnnnnnnnnnnnnnnnnnnnnnnnnnnnnnnnnnnnnnnnnnnnnnnnnnnnnnnnnnnnnnnnnnnnnnnnnnnnnnnnnnnnnnnnnnnnnnnnnnnnnnnnnnnnnnnnnnnnnnnnnnnnnnnnnnnnnnnnnnnnnnnnnnnnnnnnnnnnnnnnnnnnnnnnnnnnnnnnnnnnnnnnnnnnnnnnnnnnnnnnnnnnnnnnnnnnnnnnnnnnnnnnnnnnnnnnnnnnnnnnnnnnnnnnnnnnnnnnnnnnnnnnnnnnnnnnnnnnnnnnnnnnnnnnnnnnnnnnnnnnnnnnnnnnnnnnnnnnnnnnnnnnnnnnnnnnnnnnnnnnnnnnnnnnnnnnnnnnnnnnnnnnnnnnnnnnnnnnnnnnnnnnnnnnnnnnnnnnnnnnnnnnnnnnnnnnnnnnnnnnnnnnnnnnnnnnnnnnnnnnnnnnnnnnnnnnnnnnnnnnnnnnnnnnnnnnnnnnnnnnnnnnnnnnnnnnnnnnnnnnnnnnnnnnnnnnnnnnnnnnnnnnnnnnnnnnnnnnnnnnnnnnnnnnnnnnnnnnnnnnnnnnnnnnnnnnnnnnnnnnnnnnnnnnnnnnnnnnnnnnnnnnnnnnnnnnnnnnnnnnnnnnnnnnnnnnnnnnnnnnnnnnnnnnnnnnnnnnnnnnnnnnnnnnnnnnnnnnnnnnnnnnnnnnnnnnnnnnnnnnnnnnnnnnnnnnnnnnnnnnnnnnnnnnnnnnnnnnnnnnnnnnnnnnnnnnnnnnnnnnnnnnnnnnnnnnnnnnnnnnnnnnnnnnnnnnnnnnnnnnnnnnnnnnnnnnnnnnnnnnnnnnnnnnnnnnnnnnnnnnnnnnnnnnnnnnnnnnnnnnnnnnnnnnnnnnnnnnnnnnnnnnnnnnnnnnnnnnnnnnnnnnnnnnnnnnnnnnnnnnnnnnnnnnnnnnnnnnnnnnnnnnnnnnnnnnnnnnnnnnnnnnnnnnnnnnnnnnnnnnnnnnnnnnnnnnnnnnnnnnnnnnnnnnnnnnnnnnnnnnnnnnnnnnnnnnnnnnnnnnnnnnnnnnnnnnnnnnnnnnnnnnnnnnnnnnnnnnnnnnnnnnnnnnnnnnnnnnnnnnnnnnnnnnnnnnnnnnnnnnnnnnnnnnnnnnnnnnnnnnnnnnnnnnnnnnnnnnnnnnnnnnnnnnnnnnnnnnnnnnnnnnnnnnnnnnnnnnnnnnnnnnnnnnnnnnnnnnnnnnnnnnnnnnnnnnnnnnnnnnnnnnnnnnnnnnnnnnnnnnnnnnnnnnnnnnnnnnnnnnnnnnnnnnnnnnnnnnnnnnnnnnnnnnnnnnnnnnnnnnnnnnnnnnnnnnnnnnnnnnnnnnnnnnnnnnnnnnnnnnnnnnnnnnnnnnnnnnnnnnnnnnnnnnnnnnnnnnnnnnnnnnnnnnnnnnnnnnnnnnnnnnnnnnnnnnnnnnnnnnnnnnnnnnnnnnnnnnnnnnnnnnnnnnnnnnnnnnnnnnnnnnnnnnnnnnnnnnnnnnnnnnnnnnnnnnnnnnnnnnnnnnnnnnnnnnnnnnnnnnnnnnnnnnnnnnnnnnnnnnnnnnnnnnnnnnnnnnnnnnnnnnnnnnnnnnnnnnnnnnnnnnnnnnnnnnnnnnnnnnnnnnnnnnnnnnnnnnnnnnnnnnnnnnnnnnnnnnnnnnnnnnnnnnnnnnnnnnnnnnnnnnnnnnnnnnnnnnnnnnnnnnnnnnnnnnnnnnnnnnnnnnnnnnnnnnnnnnnnnnnnnnnnnnnnnnnnnnnnnnnnnnnnnnnnnnnnnnnnnnnnnnnnnnnnnnnnnnnnnnnnnnnnnnnnnnnnnnnnnnnnnnnnnnnnnnnnnnnnnnnnnnnnnnnnnnnnnnnnnnnnnnnnnnnnnnnnnnnnnnnnnnnnnnnnnnnnnnnnnnnnnnnnnnnnnnnnnnnnnnnnnnnnnnnnnnnnnnnnnnnnnnnnnnnnnnnnnnnnnnnnnnnnnnnnnnnnnnnnnnnnnnnnnnnnnnnnnnnnnnnnnnnnnnnnnnnnnnnnnnnnnnnnnnnnnnnnnnnnnnnnnnnnnnnnnnnnnnnnnnnnnnnnnnnnnnnnnnnnnnnnnnnnnnnnnnnnnnnnnnnnnnnnnnnnnnnnnnnnnnnnnnnnnnnnnnnnnnnnnnnnnnnnnnnnnnnnnnnnnnnnnnnnnnnnnnnnnnnnnnnnnnnnnnnnnnnnnnnnnnnnnnnnnnnnnnnnnnnnnnnnnnnnnnnnnnnnnnnnnnnnnnnnnnnnnnnnnnnnnnnnnnnnnnnnnnnnnnnnnnnnnnnnnnnnnnnnnnnnnnnnnnnnnnnnnnnnnnnnnnnnnnnnnnnnnnnnnnnnnnnnnnnnnnnnnnnnnnnnnnnnnnnnnnnnnnnnnnnnnnnnnnnnnnnnnnnnnnnnnnnnnnnnnnnnnnnnnnnnnnnnnnnnnnnnnnnnnnnnnnnnnnnnnnnnnnnnnnnnnnnnnnnnnnnnnnnnnnnnnnnnnnnnnnnnnnnnnnnnnnnnnnnnnnnnnnnnnnnnnnnnnnnnnnnnnnnnnnnnnnnnnnnnnnnnnnnnnnnnnnnnnnnnnnnnnnnnnnnnnnnnnnnnnnnnnnnnnnnnnnnnnnnnnnnnnnnnnnnnnnnnnnnnnnnnnnnnnnnnnnnnnnnnnnnnnnnnnnnnnnnnnnnnnnnnnnnnnnnnnnnnnnnnnnnnnnnnnnnnnnnnnnnnnnnnnnnnnnnnnnnnnnnnnnnnnnnnnnnnnnnnnnnnnnnnnnnnnnnnnnnnnnnnnnnnnnnnnnnnnnnnnnnnnnnnnnnnnnnnnnnnnnnnnnnnnnnnnnnnnnnnnnnnnnnnnnnnnnnnnnnnnnnnnnnnnnnnnnnnnnnnnnnnnnnnnnnnnnnnnnnnnnnnnnnnnnnnnnnnnnnnnnnnnnnnnnnnnnnnnnnnnnnnnnnnnnnnnnnnnnnnnnnnnnnnnnnnnnnnnnnnnnnnnnnnnnnnnnnnnnnnnnnnnnnnnnnnnnnnnnnnnnnnnnnnnnnnnnnnnnnnnnnnnnnnnnnnnnnnnnnnnnnnnnnnnnnnnnnnnnnnnnnnnnnnnnnnnnnnnnnnnnnnnnnnnnnnnnnnnnnnnnnnnnnnnnnnnnnnnnnnnnnnnnnnnnnnnnnnnnnnnnnnnnnnnnnnnnnnnnnnnnnnnnnnnnnnnnnnnnnnnnnnnnnnnnnnnnnnnnnnnnnnnnnnnnnnnnnnnnnnnnnnnnnnnnnnnnnnnnnnnnnnnnnnnnnnnnnnnnnnnnnnnnnnnnnnnnnnnnnnnnnnnnnnnnnnnnnnnnnnnnnnnnnnnnnnnnnnnnnnnnnnnnnnnnnnnnnnnnnnnnnnnnnnnnnnnnnnnnnnnnnnnnnnnnnnnnnnnnnnnnnnnnnnnnnnnnnnnnnnnnnnnnnnnnnnnnnnnnnnnnnnnnnnnnnnnnnnnnnnnnnnnnnnnnnnnnnnnnnnnnnnnnnnnnnnnnnnnnnnnnnnnnnnnnnnnnnnnnnnnnnnnnnnnnnnnnnnnnnnnnnnnnnnnnnnnnnnnnnnnnnnnnnnnnnnnnnnnnnnnnnnnnnnnnnnnnnnnnnnnnnnnnnnnnnnnnnnnnnnnnnnnnnnnnnnnnnnnnnnnnnnnnnnnnnnnnnnnnnnnnnnnnnnnnnnnnnnnnnnnnnnnnnnnnnnnnnnnnnnnnnnnnnnnnnnnnnnnnnnnnnnnnnnnnnnnnnnnnnnnnnnnnnnnnnnnnnnnnnnnnnnnnnnnnnnnnnnnnnnnnnnnnnnnnnnnnnnnnnnnnnnnnnnnnnnnnnnnnnnnnnnnnnnnnnnnnnnnnnnnnnnnnnnnnnnnnnnnnnnnnnnnnnnnnnnnnnnnnnnnnnnnnnnnnnnnnnnnnnnnnnnnnnnnnnnnnnnnnnnnnnnnnnnnnnnnnnnnnnnnnnnnnnnnnnnnnnnnnnnnnnnnnnnnnnnnnnnnnnnnnnnnnnnnnnnnnnnnnnnnnnnnnnnnnnnnnnnnnnnnnnnnnnnnnnnnnnnnnnnnnnnnnnnnnnnnnnnnnnnnnnnnnnnnnnnnnnnnnnnnnnnnnnnnnnnnnnnnnnnnnnnnnnnnnnnnnnnnnnnnnnnnnnnnnnnnnnnnnnnnnnnnnnnnnnnnnnnnnnnnnnnnnnnnnnnnnnnnnnnnnnnnnnnnnnnnnnnnnnnnnnnnnnnnnnnnnnnnnnnnnnnnnnnnnnnnnnnnnnnnnnnnnnnnnnnnnnnnnnnnnnnnnnnnnnnnnnnnnnnnnnnnnnnnnnnnnnnnnnnnnnnnnnnnnnnnnnnnnnnnnnnnnnnnnnnnnnnnnnnnnnnnnnnnnnnnnnnnnnnnnnnnnnnnnnnnnnnnnnnnnnnnnnnnnnnnnnnnnnnnnnnnnnnnnnnnnnnnnnnnnnnnnnnnnnnnnnnnnnnnnnnnnnnnnnnnnnnnnnnnnnnnnnnnnnnnnnnnnnnnnnnnnnnnnnnnnnnnnnnnnnnnnnnnnnnnnnnnnnnnnnnnnnnnnnnnnnnnnnnnnnnnnnnnnnnnnnnnnnnnnnnnnnnnnnnnnnnnnnnnnnnnnnnnnnnnnnnnnnnnnnnnnnnnnnnnnnnnnnnnnnnnnnnnnnnnnnnnnnnnnnnnnnnnnnnnnnnnnnnnnnnnnnnnnnnnnnnnnnnnnnnnnnnnnnnnnnnnnnnnnnnnnnnnnnnnnnnnnnnnnnnnnnnnnnnnnnnnnnnnnnnnnnnnnnnnnnnnnnnnnnnnnnnnnnnnnnnnnnnnnnnnnnnnnnnnnnnnnnnnnnnnnnnnnnnnnnnnnnnnnnnnnnnnnnnnnnnnnnnnnnnnnnnnnnnnnnnnnnnnnnnnnnnnnnnnnnnnnnnnnnnnnnnnnnnnnnnnnnnnnnnnnnnnnnnnnnnnnnnnnnnnnnnnnnnnnnnnnnnnnnnnnnnnnnnnnnnnnnnnnnnnnnnnnnnnnnnnnnnnnnnnnnnnnnnnnnnnnnnnnnnnnnnnnnnnnnnnnnnnnnnnnnnnnnnnnnnnnnnnnnnnnnnnnnnnnnnnnnnnnnnnnnnnnnnnnnnnnnnnnnnnnnnnnnnnnnnnnnnnnnnnnnnnnnnnnnnnnnnnnnnnnnnnnnnnnnnnnnnnnnnnnnnnnnnnnnnnnnnnnnnnnnnnnnnnnnnnnnnnnnnnnnnnnnnnnnnnnnnnnnnnnnnnnnnnnnnnnnnnnnnnnnnnnnnnnnnnnnnnnnnnnnnnnnnnnnnnnnnnnnnnnnnnnnnnnnnnnnnnnnnnnnnnnnnnnnnnnnnnnnnnnnnnnnnnnnnnnnnnnnnnnnnnnnnnnnnnnnnnnnnnnnnnnnnnnnnnnnnnnnnnnnnnnnnnnnnnnnnnnnnnnnnnnnnnnnnnnnnnnnnnnnnnnnnnnnnnnnnnnnnnnnnnnnnnnnnnnnnnnnnnnnnnnnnnnnnnnnnnnnnnnnnnnnnnnnnnnnnnnnnnnnnnnnnnnnnnnnnnnnnnnnnnnnnnnnnnnnnnnnnnnnnnnnnnnnnnnnnnnnnnnnnnnnnnnnnnnnnnnnnnnnnnnnnnnnnnnnnnnnnnnnnnnnnnnnnnnnnnnnnnnnnnnnnnnnnnnnnnnnnnnnnnnnnnnnnnnnnnnnnnnnnnnnnnnnnnnnnnnnnnnnnnnnnnnnnnnnnnnnnnnnnnnnnnnnnnnnnnnnnnnnnnnnnnnnnnnnnnnnnnnnnnnnnnnnnnnnnnnnnnnnnnnnnnnnnnnnnnnnnnnnnnnnnnnnnnnnnnnnnnnnnnnnnnnnnnnnnnnnnnnnnnnnnnnnnnnnnnnnnnnnnnnnnnnnnnnnnnnnnnnnnnnnnnnnnnnnnnnnnnnnnnnnnnnnnnnnnnnnnnnnnnnnnnnnnnnnnnnnnnnnnnnnnnnnnnnnnnnnnnnnnnnnnnnnnnnnnnnnnnnnnnnnnnnnnnnnnnnnnnnnnnnnnnnnnnnnnnnnnnnnnnnnnnnnnnnnnnnnnnnnnnnnnnnnnnnnnnnnnnnnnnnnnnnnnnnnnnnnnnnnnnnnnnnnnnnnnnnnnnnnnnnnnnnnnnnnnnnnnnnnnnnnnnnnnnnnnnnnnnnnnnnnnnnnnnnnnnnnnnnnnnnnnnnnnnnnnnnnnnnnnnnnnnnnnnnnnnnnnnnnnnnnnnnnnnnnnnnnnnnnnnnnnnnnnnnnnnnnnnnnnnnnnnnnnnnnnnnnnnnnnnnnnnnnnnnnnnnnnnnnnnnnnnnnnnnnnnnnnnnnnnnnnnnnnnnnnnnnnnnnnnnnnnnnnnnnnnnnnnnnnnnnnnnnnnnnnnnnnnnnnnnnnnnnnnnnnnnnnnnnnnnnnnnnnnnnnnnnnnnnnnnnnnnnnnnnnnnnnnnnnnnnnnnnnnnnnnnnnnnnnnnnnnnnnnnnnnnnnnnnnnnnnnnnnnnnnnnnnnnnnnnnnnnnnnnnnnnnnnnnnnnnnnnnnnnnnnnnnnnnnnnnnnnnnnnnnnnnnnnnnnnnnnnnnnnnnnnnnnnnnnnnnnnnnnnnnnnnnnnnnnnnnnnnnnnnnnnnnnnnnnnnnnnnnnnnnnnnnnnnnnnnnnnnnnnnnnnnnnnnnnnnnnnnnnnnnnnnnnnnnnnnnnnnnnnnnnnnnnnnnnnnnnnnnnnnnnnnnnnnnnnnnnnnnnnnnnnnnnnnnnnnnnnnnnnnnnnnnnnnnnnnnnnnnnnnnnnnnnnnnnnnnnnnnnnnnnnnnnnnnnnnnnnnnnnnnnnnnnnnnnnnnnnnnnnnnnnnnnnnnnnnnnnnnnnnnnnnnnnnnnnnnnnnnnnnnnnnnnnnnnnnnnnnnnnnnnnnnnnnnnnnnnnnnnnnnnnnnnnnnnnnnnnnnnnnnnnnnnnnnnnnnnnnnnnnnnnnnnnnnnnnnnnnnnnnnnnnnnnnnnnnnnnnnnnnnnnnnnnnnnnnnnnnnnnnnnnnnnnnnnnnnnnnnnnnnnnnnnnnnnnnnnnnnnnnnnnnnnnnnnnnnnnnnnnnnnnnnnnnnnnnnnnnnnnnnnnnnnnnnnnnnnnnnnnnnnnnnnnnnnnnnnnnnnnnnnnnnnnnnnnnnnnnnnnnnnnnnnnnnnnnnnnnnnnnnnnnnnnnnnnnnnnnnnnnnnnnnnnnnnnnnnnnnnnnnnnnnnnnnnnnnnnnnnnnnnnnnnnnnnnnnnnnnnnnnnnnnnnnnnnnnnnnnnnnnnnnnnnnnnnnnnnnnnnnnnnnnnnnnnnnnnnnnnnnnnnnnnnnnnnnnnnnnnnnnnnnnnnnnnnnnnnnnnnnnnnnnnnnnnnnnnnnnnnnnnnnnnnnnnnnnnnnnnnnnnnnnnnnnnnnnnnnnnnnnnnnnnnnnnnnnnnnnnnnnnnnnnnnnnnnnnnnnnnnnnnnnnnnnnnnnnnnnnnnnnnnnnnnnnnnnnnnnnnnnnnnnnnnnnnnnnnnnnnnnnnnnnnnnnnnnnnnnnnnnnnnnnnnnnnnnnnnnnnnnnnnnnnnnnnnnnnnnnnnnnnnnnnnnnnnnnnnnnnnnnnnnnnnnnnnnnnnnnnnnnnnnnnnnnnnnnnnnnnnnnnnnnnnnnnnnnnnnnnnnnnnnnnnnnnnnnnnnnnnnnnnnnnnnnnnnnnnnnnnnnnnnnnnnnnnnnnnnnnnnnnnnnnnnnnnnnnnnnnnnnnnnnnnnnnnnnnnnnnnnnnnnnnnnnnnnnnnnnnnnnnnnnnnnnnnnnnnnnnnnnnnnnnnnnnnnnnnnnnnnnnnnnnnnnnnnnnnnnnnnnnnnnnnnnnnnnnnnnnnnnnnnnnnnnnnnnnnnnnnnnnnnnnnnnnnnnnnnnnnnnnnnnnnnnnnnnnnnnnnnnnnnnnnnnnnnnnnnnnnnnnnnnnnnnnnnnnnnnnnnnnnnnnnnnnnnnnnnnnnnnnnnnnnnnnnnnnnnnnnnnnnnnnnnnnnnnnnnnnnnnnnnnnnnnnnnnnnnnnnnnnnnnnnnnnnnnnnnnnnnnnnnnnnnnnnnnnnnnnnnnnnnnnnnnnnnnnnnnnnnnnnnnnnnnnnnnnnnnnnnnnnnnnnnnnnnnnnnnnnnnnnnnnnnnnnnnnnnnnnnnnnnnnnnnnnnnnnnnnnnnnnnnnnnnnnnnnnnnnnnnnnnnnnnnnnnnnnnnnnnnnnnnnnnnnnnnnnnnnnnnnnnnnnnnnnnnnnnnnnnnnnnnnnnnnnnnnnnnnnnnnnnnnnnnnnnnnnnnnnnnnnnnnnnnnnnnnnnnnnnnnnnnnnnnnnnnnnnnnnnnnnnnnnnnnnnnnnnnnnnnnnnnnnnnnnnnnnnnnnnnnnnnnnnnnnnnnnnnnnnnnnnnnnnnnnnnnnnnnnnnnnnnnnnnnnnnnnnnnnnnnnnnnnnnnnnnnnnnnnnnnnnnnnnnnnnnnnnnnnnnnnnnnnnnnnnnnnnnnnnnnnnnnnnnnnnnnnnnnnnnnnnnnnnnnnnnnnnnnnnnnnnnnnnnnnnnnnnnnnnnnnnnnnnnnnnnnnnnnnnnnnnnnnnnnnnnnnnnnnnnnnnnnnnnnnnnnnnnnnnnnnnnnnnnnnnnnnnnnnnnnnnnnnnnnnnnnnnnnnnnnnnnnnnnnnnnnnnnnnnnnnnnnnnnnnnnnnnnnnnnnnnnnnnnnnnnnnnnnnnnnnnnnnnnnnnnnnnnnnnnnnnnnnnnnnnnnnnnnnnnnnnnnnnnnnnnnnnnnnnnnnnnnnnnnnnnnnnnnnnnnnnnnnnnnnnnnnnnnnnnnnnnnnnnnnnnnnnnnnnnnnnnnnnnnnnnnnnnnnnnnnnnnnnnnnnnnnnnnnnnnnnnnnnnnnnnnnnnnnnnnnnnnnnnnnnnnnnnnnnnnnnnnnnnnnnnnnnnnnnnnnnnnnnnnnnnnnnnnnnnnnnnnnnnnnnnnnnnnnnnnnnnnnnnnnnnnnnnnnnnnnnnnnnnnnnnnnnnnnnnnnnnnnnnnnnnnnnnnnnnnnnnnnnnnnnnnnnnnnnnnnnnnnnnnnnnnnnnnnnnnnnnnnnnnnnnnnnnnnnnnnnnnnnnnnnnnnnnnnnnnnnnnnnnnnnnnnnnnnnnnnnnnnnnnnnnnnnnnnnnnnnnnnnnnnnnnnnnnnnnnnnnnnnnnnnnnnnnnnnnnnnnnnnnnnnnnnnnnnnnnnnnnnnnnnnnnnnnnnnnnnnnnnnnnnnnnnnnnnnnnnnnnnnnnnnnnnnnnnnnnnnnnnnnnnnnnnnnnnnnnnnnnnnnnnnnnnnnnnnnnnnnnnnnnnnnnnnnnnnnnnnnnnnnnnnnnnnnnnnnnnnnnnnnnnnnnnnnnnnnnnnnnnnnnnnnnnnnnnnnnnnnnnnnnnnnnnnnnnnnnnnnnnnnnnnnnnnnnnnnnnnnnnnnnnnnnnnnnnnnnnnnnnnnnnnnnnnnnnnnnnnnnnnnnnnnnnnnnnnnnnnnnnnnnnnnnnnnnnnnnnnnnnnnnnnnnnnnnnnnnnnnnnnnnnnnnnnnnnnnnnnnnnnnnnnnnnnnnnnnnnnnnnnnnnnnnnnnnnnnnnnnnnnnnnnnnnnnnnnnnnnnnnnnnnnnnnnnnnnnnnnnnnnnnnnnnnnnnnnnnnnnnnnnnnnnnnnnnnnnnnnnnnnnnnnnnnnnnnnnnnnnnnnnnnnnnnnnnnnnnnnnnnnnnnnnnnnnnnnnnnnnnnnnnnnnnnnnnnnnnnnnnnnnnnnnnnnnnnnnnnnnnnnnnnnnnnnnnnnnnnnnnnnnnnnnnnnnnnnnnnnnnnnnnnnnnnnnnnnnnnnnnnnnnnnnnnnnnnnnnnnnnnnnnnnnnnnnnnnnnnnnnnnnnnnnnnnnnnnnnnnnnnnnnnnnnnnnnnnnnnnnnnnnnnnnnnnnnnnnnnnnnnnnnnnnnnnnnnnnnnnnnnnnnnnnnnnnnnnnnnnnnnnnnnnnnnnnnnnnnnnnnnnnnnnnnnnnnnnnnnnnnnnnnnnnnnnnnnnnnnnnnnnnnnnnnnnnnnnnnnnnnnnnnnnnnnnnnnnnnnnnnnnnnnnnnnnnnnnnnnnnnnnnnnnnnnnnnnnnnnnnnnnnnnnnnnnnnnnnnnnnnnnnnnnnnnnnnnnnnnnnnnnnnnnnnnnnnnnnnnnnnnnnnnnnnnnnnnnnnnnnnnnnnnnnnnnnnnnnnnnnnnnnnnnnnnnnnnnnnnnnnnnnnnnnnnnnnnnnnnnnnnnnnnnnnnnnnnnnnnnnnnnnnnnnnnnnnnnnnnnnnnnnnnnnnnnnnnnnnnnnnnnnnnnnnnnagtattctcagcaacttctttgtgacgtttgcattcatctcacagtgttgaacataccttttcatagagtagttttgaaacactatttttgtagaatctgcaagtggatatttggactgcgttgagaccttcattggaaatgggaatgtcttcacataaacactagacagaagcattctctgaaacttctttgtgatgtgtgtattcaactcacagagttgaaccttccttttttatggagcagttttgaaacactgtttttgtagaatctgcaagtggatatttggagcgatttgaggcctatggtagaaaaagaaatatcttcatataaatagtagacagaagtattctcagaaacatctttgtgatgtttgcattcaactcacagagttgatccttccttttaatagggcagttttgcaacactctttttgtagaatgcaccagtgggcttttggagcacgtcaagggctatggtgaaaaaggaaatatcttcacataaaaactagacagaagtattctgtaaaactcctttgtgatgtttgcattcagctcagaaagttgaacttctctttatatagtccagttttcaaacactatttttgtagaatctgcaagtggatactgggactgctttgaggccttcgttggaaacgggattatcttcacatagaaactagactgaaggattcttagaaacttctttgtgatgtgtgcattcaactcaccgagtggaacctcacttttgatagagcagagttgaaagacacttgttgtagaatctgcatgtggatatttggagtgctttgaagccttccttggaaacgggaatatcttcacataaaaactagacataaggattctcagaaacttccttgtgatctgtccattcaacacacagagttgaactttcctttttatggagccgttttgaaacactgtttttgtagaatctgaaagtggatatttggagcgctttgaggcttaaggtagaaaaagaaatatctgcatatcaaaactagacagaagcgttctcagaaacttctttgtgatgtttgcattcaactaccagagttgaaccttccttttgatagaggagttttgaaatgctctttttgtagaatctgcacgtggatacctggaacgatttttgagacctatgtctcaaaaggaaatatcttcctatgaaaaatagacaaaagcattctcagaaactactttgtgttatgtgcattcaactcacagagtacaaccttttttttgatagagtagttttgaaacactctgtagaatctgaaagtggatatttggagctctttgagggctatggtggaaaagaaaatatattcacattaaactagccagaagcattctcagaaacttctttatgatgtttgcattaaactcacagagttgaacatacctttccatagagcagttttgaaacactctttttgtggaatccgcaagcggatatttggaccgctttgagaccttcgctggaaatgggaatgtcttcacatataaactaaacagaagcattctcagaaacttcttcgtgatgtgtgcattctactcccaaagttgaaccttccttttcataaagcatttttgaaacactccttttgtacaatctacaattggatatttggaacgctttgatgcccgtggtagaaaaggaaatctcctcatataaaaactagacagaaggattcacagaaactgctttgtgacgtgtgcattcaaatcacggagttggacctttcttttgttagagcagttttgaaacactgtttctgtggaatctgccagcggacatttggagcgcattgagggctatggtggagaaggaaatatcttcacagaaaaactagaaagaagcattctcggaaacatctatgtgaagtgtgcattcaactcacagagttgaaccttccttttgatagaagagttttgaaacactcttttgtacaattgcaggtgaatatttggagcgctttgaagcctttgttggaaatgggaatatcctcacataaaaactagccagaagcattctcagaaacttctatgtgatgtgtgcattgaacccagagaggtgaaccgttcctttgagagagcagttttgaaacgtgtttttgtaagatctgcaagtggatattaggggcgctttgagtccttaggtggaaacgggaatatcttcgaataaaaactagacagaatgattctcagaatcttctttgtgatgtgggcattcaactaacacagttgaacatttcttttgacagagcagttctgaaacactctttttgtagaatccgccagtggatatttggagcgctttgagggctattgtgcaaatggaaatatcttcacctaaaaactagaccgaagcaatcccagaaactactttgtgatgtttgcattcaactcatagagttgaacctacctcttcatagagcagtttggaaaacctctttttgtagaatctgcaagtggatatttggaccactttgaggccttcataggaaacagtactatcttcacataaaaactaggtagaagcattgtcagaaaattctttgtgatgtgtgaattcaactcacagagttgaaccttcctttaatagagcagttttgaaacactctttttgtagaatctgcaagtagatatttggagcgctttgaggccttcgttggaaaccggaatatcttcacataaaaagtagatagaggcattctcagaaactttttttgtgatatgtagattcagttcacagcgttgaacctttcttttgatagagcagttttgaaaaactcttttatcgagtctgcaagtagacatttggagtgctttgagggctgtggtcgaaaaggaaatatcttcacatagaaactagactgaatcattctcagcaacttcttggtgacgtttgcattcatctcacagtgttgaacatacctttgcatagagtagttttgaaacactatttttgtagaatctgcaagtggacatttggactgctttgaggccttcatcggaaacgggaatatcttcacataaacactagacagaagcattctctgaaacttctttgtgatgtgtgtattcaactcacagagttgaaccatcttttttatggagcggttttgaaacagtgttttttgtagaatcagcaattggatattgggagcgctttgaggcctctggtgtaaagggaatgtcttcacataaaaactggacagaagcattctcagaaacatctttgtgatgtttgcattcaactcacagagttgatccttccttttaatagggcagttttgcaacactctttttgtagaatgcaccagcgggcttttggagcacgtcaagggctatggtgaaaaaggaaatatcttcacaaaaaaccagacagaagtattctgtaaaactcctttgtgatgtttgcattcaactcagaaagttgaacttctctttatatagtccagttttcaaacactatttttgtagaatctgcaagtggatagtgggactgctttgaggccttcattggaaacgggattatcttcacataaaaactagacataaggattcttagaaacttctttgtgatgtgtgcattcaactcaccgagtggaacctcacttttgatagagcagtgttgaaagacacttgttgtagaatctgcaggtggatatttggagtgctttgaagccttccttggaaacgggaatatcttcacataaaaactagacataagcattctcagaaactcctttgtgatctgtccattcagctcacagagttgaaccttccttttgatagagcagttttgaaacactctttctgtagagtgtgcaagtggatatcaggagcgctttgtcgcctatggcagaaaaagaaatatctggctctaaaaactagacagaagcgttctcagaaacttctttgtgatgtttgcattcaactaccagagttgaaccttccttttgatagagcagttttgaaacgctctttttgtagaatctgcacgtggatatctggagcgatttttgaggcctacgttcaaaaaggaaatatcttcctatgaaaaacagacaaaagcattctcagaaactacttagagatatgtgcattcaactcacagagttgaaacttttttttgatagagcagttttgaaacactctgtagaatctgaaagtggatatttggagctatttgagggctatggtggaaaagaaaatatattcccattaaactagacagaagcattctcagaaacttctgtatgatgtttgcattaaactcacagagttgaacatacctttccatagagcagttttgaaacactctttttgtggaatccgcaagtggatatttggaccgctttgagaccttcgctggaaatgggaatatcttcacatataaactatacagaagcattctcggaaacttcttcgtgatgtgtgcattctgctcccaaagttgaaccttccttttcataaagcagttttgaaacactcttttgtacaatctaccattggatatgtggaaggctttgatgcccatggtagaaatggaaacatcctcatataaaatctagacagaaggattcacagaaactgctgtgtgatgtgtgcatcgaaatcacggagttgaacttttcttttgttagagcagttttgaaaccccgtttccgtggaatctgccagtggacatttggagcgcattgagggctatggtggagaaggaaatatcttcacataaaaactagaaagaagcattctcagaaacatctatgtgaaatgtgcattcaactcacagatttgaaccttccttttgatagaacagttttgaaacactcttttgtacaattttaggtgaatatttggagctccttgaagcctttgttggaattgtgaatatcttcacatacaaactagccagaagcattctcagaaacttctttgtgatgtgtgcgttgaactcagagagatgaacctttcctttgatagagcagttttgaaacgtgtttctgtaagatctgtatgtggatatttggggcgctttgagtcctttggtggaaacgggaatatcttctaataaaaactagacaaaaatattctcagaatcttctttgtgatgagggcattcaactaacacatttgaacatttcttttcacagagcagttttgaaacactcttttggtggaatctgccagaggatatctggagcgctttgagggctattgtgccaatggaaatatcttcccctaaaaactagacagaagcattctcagaaactacttcgtgatgtttgcattcaactcacagagttgaacatacctcttcatagagcagttttgaaaacctctttctgtagaatctgcaagtggatattcggaccactttgaggccttcataggaaacagtaatatcttcacataaaaactagatagaagcattgtcagaaagttctttgtgatgtgtgaattcaactcacagagttgaaccttcctttaatagagcagttttgaaacactctttttctagaatctgcaagtagatatttggagcgctttgaggccttcgttggaaaccggaatatcttcacaggaaaagtagatagaggcatgctcagaaacttttttgtcatatgtagattcaactcacagcgttgaacctttcttttgatagagcagttttgaaaaactcttttatcgaatctgcaagtagacatttggagtgctttgagggctgtggtgcaaaaggaaatgtcttcccatagaaactagactgaagcattctcagcaacttctttgtgacgtttgcattgatctcacagtgttgaacatacctttgcatagagtagttttgaaacactatttttgtagaatctgcaagtggatatttggactgctttgaggcctctatcggaaacgggaatatcttcacataaacactggacagaagcattctctgaaacttctttgtgatgtgtgtattcaactcacagagtggaaccatcttttttatggagcggttttgaaacagtgtttttgtagaatcagcaattggatatttggagcgctttgaggcctctggtggaaagggaatgtcttcacataaaaactggacagaagcattctcagaaacatctttgtgatgtttgcattcaactcacagagttgatccttccttttaatagggcagttttgcaacactctttttgtagaatgcaccagtgggcttttggagcacgtcaagggctttggtgaaaaaggaaatatcttcacataaaaactagacagaagtattctgtaaaactcctttgtgatgtttgcattcaactcagaaagttgaacttctctttatatagtccagttttcaaacactatttttgtagaatctgcaagtggatactgggactgctttgaggccttcgttggaaacgggattatcttcacataaaaactagactgaaggattcttagaaacttctttgtgatgtgtgcattcaactcaccgagtggaacctcacttttgatagagcagtgttgaaagacacttgttgtagaatctgcaggtggatatttggagtgctttgaagccttccttggaaacgggaatatcttcacataaaaactagacataagcattctcagaaactcctttgtgatctgtccattcagctcacagagttgaaccttccttttgatagagcagttttgaaacactctttctgtagagtctgcaagtggatatcaggagcgctttgaagcctatggtagaaaaagaaatatctggctctaaaaactagacagaagcattctgagaaacttctttgtgatgtttgcattcaactaccagagttgaaccttcctttttgatagagcagttttgaaacactctttttgtagaatctgcatgtggatatctggagcgatttgaggcctatggtcaaaaaggaaatatcttcctatgaaaaactgacaaaagcattctcagaaactactttgtgttatgtgcattcaactcacagagtacaaccttttttttgatagagcagttttgaaacactctgtagaatctgaaagtggatatttggagctctttgagggctatggtggaaaagaaaatatattcacattaaactagccagaagcatcctcagaaacttctttatgatgtttgcattaaactcacagagttgaacacaccattccatagagcagtgttgaaacactctttttggggaatccgcaagtggatatttggaccgctttgagacctttgctggaaatgggaatatcttcacatataaactagacagaagcattctcggaaacttcttcgtgatgtgtgcattctgctcccaaagttgaaccttcctcttcataaagcagttttgaaacactcttttgtacaatctaccattggatatgtggaaggctttgatgcccatggtagaaaaggaaacatcttcatataaaatctagacagaaggattcacagaaactgctgtgtgatgtgtgcatccaaatcacggagttgaacttttcttttgttagagcagttttgaaaccccgtttccgtggaatctgccagtggacatttggagcgcattgagggctatggtggagaaggaaatatcttcacataaaaactagaaagaagcattctcagaaacatctatgtgaagtgtgcattcaactcacagagttgaaccttccttttgatagaagagttttgaaacactcttttgtacaattgcaggtgaatatttggagcgatttgaagcctttgttggaaatgggaatatcctcacataaaaactagccagaagcattctcagaaacttctttgtgatgtgtgcgttgaacccagagagatgaacctttcctttgatagagcagttttgaaacgtgtttttgtaagatctgcaagcggataattggcttcgctttgtgtcctttgttggaaacgggaatatcttctaataaaaactagacagaattattctcagaatcttctttgtgatgtgggcattcaactaacacagttgaacatttcttttgacagagcagttctgaaacactctttttgtagaatccgccagtggatatttggagcgctttgagggctattgtgcaaatggaaatatctacacctaaaaactagaccgaagcattctcagaaactactttgtgatgtttgcattcaactcacagagatgaacatacctctttatagagcagttttgaaatcctctttctgtagaatctgcaagtggatattcggaccactttgaggccttcatagaaaacagtaatatcttcacataaaaactagattcaagcattctcagaaacttctttgtgatgtgtgaattcaactcacagagttgaaccttcctttaatagagcagttttgaaacactctttttgtagaatctgcaagtagatatttggagagctttgaggccttcgttggaaaccggaatatcttcacataaaaagtagatagaagcattctcagaaactttttttgatatgtagattcaactcacagcattcaacctttcttttgatagagcagtttggaaaactcttttatcaaatctgcaagtagacatttggagtgctttgagggctgtggtcgaaaaggaaatatcttcacatagaaactagactgaagcattctcagcaacttcttcgtgtcgtttgcattcatctcacactgttgaacataccttttcttagagcagttttgaaacattctttttgtagaaactgcaattggatatttggactgcgttgaggcctccactggaaacgggaatatcttcacataaacaatagacagaagcattctctgaaacttctttgtgatgtgtgtattcaactcacagagttgaaccatcttttttatggagcggttttgaaacagtgtttttgtagaatcagcaagtggatattgggagcgctttgaggcctctggtggaaagggaatgtcttcacataaaaactggacagaagcattctcagaaacatctttgtgatgtttgcattcaactcacagagttgatccttccttttaatagggcagttttgcaacactctttttgtacaatgcaccagtgggcttttggagcacgtcaagggctatggtgaaaaaggaaatatcttcacataaaaactagacagaagtattctgtaaaactcctttgtgatgtttgcattcaactcagaaagttgaacttctctttatatagtccagttttcaaacactatttttgtagaatctgcaagtggatactgggactgctttgaggccttcgttggaaacgggattatcttcacatagaaactagactgaaggattcttagaaacttctttgtgatgtgtgcattcaactcaccgagtggaacctcacttttgatagagcagagttgaaagacacttgttgtagaatctgcaggtggatatttggagtgctttgaagccttccttggaaacgggaatatcttcacataaaaactagacataagcattctcagaaactcctttgtgatctgtccattcagctcacagagttgaaccttccttttgatagagcagttttgaaacactctttctgtagagtgtgcaagtggatatcaggagcgcttcgaggcctatggcagaaaaagaaatatctggctctaaaaactagacagaagcattctcagaaacttctttgtgatgtttgcattcaactaccagagttgaaccttccttttgatagaacagttttgaaacgctctttttgtagaatctgcatgtggatacctggagcgatttttgagacctatgtctcaaaaggaaatatcttcctatgaaaaatagacaaaagcattctcagaaactactttgtgttatgtgcattccactcacagagttgaaccttttttttgatacagcagttttgaaacactctgtagaatctgaaagtggatatttgtagctctttgagggctatggtggaaaagaaaatatattcacattaaactagacagaagcattctcagaaacttctttatgatgtttgcatcaaactcacagatttgaacatacctttccatagagcagttttgaaacactctttttgtggaatccgcaagtggatatttggaccgttttgagacctttgctggaaatgggaatatcttcatatataaactggacagaatcattctcggaaacttcttcctgatgtgtgcattctgctcccaaatttgaaccttcttcttcataaagcagttttgaaacactcttttgtacaatctaccattggatatgtggaaggctttgatgcccatggtagaaaaggatacatcctcatataaaatctagacagaaggattcacagaaactgctgtgtgatgtgtgcatccaaatcacggagttgaacttttcttttgttagagcagttttgaaaccccgtttccgtggaatctgcctgtggacatttggagcgcattgagggctatggtggagaaagaaatatcttcacataaaaactagaaagaagcattctcagaaacatctatgtgaagtgtgcattcaactcacagagttgaaccttccttttgatagaagagttttgaaacactcttttgtactattgcaggtgaatatttggagcgatttgaagcctttgttggaaatgggaatatcctcacataaaaagtagccagaagcattctcagaaacttctttgtgatgtgtgcattgaacccagagagatgaaccattcctttgatagagcagttttgaaacgtgtttctgtaagatctgcaagtggatatttgggacgctttgagtcctttggtggaaacgggaatatcttctaataaaaactagaccgaaatattctcagaatcttctttgtgatgtgggcattcaactaacagagttgaacatttcttgtgacagagcagttttgaaacactctttttgtagaatctgccagtggatatttggagcgctttgagggctttgtagaaatggaaaagtcttcacctaaaaactagacagaagcaatcccagaaactactttgtgatgtttgcattaaactcatagagttgaacctacctcttcatagagcagtttggaaaacctctttttgtagaatctgcaagtggatatttggaccactttgaggccttcataggaaacagtactatcttcacataaaatctaggtagaagcattgtcagaaagttctttgtgatgtgtgaattcaactcacagagttgaaccttcctttaatagagcagttttgaaacactctttttgtagaatctgcaagtacatatttggagcgctttgaggccttcgttggaaaccggaatatcttcacataaaaagtagatagaggcattctcagaaacttttttgtgatatgtagattcagttcacagcgttgaacctttcttttgatagagcagttttgaaaaactcttttatcgaatctgtaagtagacatttggagtgctttgagggctgtggtcgaaaaggaaatatcttcacatagaaactagactgaagcattctcagcaacttctttgtgtcgtttgcattcatctcacagtgttgaacataccttttcatagagcagttttgaaacactctttttgtagaatctgcaattggatatttggactgcgttgaggcctccactggaaacgggaatatcttcacataaacactagacagaagcattctctgaaacttctttgtgatgtgtgtattcaactcacagagttgaaccatcttttttatggagcggttttgaaacagtgtttttgtagaatcagcaagtggatatttggagcgctttgaggcctctggtggaaagggaatgtcttcacataaaaactggacagaagtattctcagaaacatctttgtgatgtttgcattcaactcacagagttgatccttccttttaatagggcagttttgcaacactctttttgtagaatgcaccagtgggcttttggagcacgtcaagggctatggtgaaaaaggaaatatcttcacataaaaactagacggaagtattctgtaaaactcctttgtgatgtttgcattcaactcagaaagttgaacttctctttatatagtccagttttcaaacactatttttgtagaatctgcaagtggatactgggactgctttgaggccttcgttggaaacgggattatcttcacatagaaactagactgaaggattcttagaaacttctttgtgatgtgtgcattcaactcaccgagtggaacctcacttttgatagagcagtgttgaaagacacttgttgtagaatctgcaggtggatatttggagtgctttgaagccttccttggaaacgggaatatcttcacataaaaactagacataagcattctcagaaactcctttgtgatctgtccattcagctcacagagttgaaccttccctttgatagagcagttttgaaacactctttctgtagagtctgcaagtggatatcaggagcgctttgaagcctatggtagaaaaagaaatatctggctctaaaaactagacagaagcattctcagaaacttctttgtgatgtttgcattcaactaccagagttgaaccttccttttgatagagcagttttgaaacactctttttgtagaatctgcacgtggatatctggagcgatttttgaggcctacgttcgaaaaggaaatatcttcctatgaaaaatagacaaaagcattctcacaaactactttgagatatgtgcattcaactcacagagttgaaacttttttttgatagagcagttttgaaacactctgtagaatctgaaagtggatatttggagctatttgagggctatggtggaaaggaaaatatattcccattaaactagacagaagcatcctcagaaacttctttatgatgtttgcattaaactcacagagttgaacatacctttccatagagcagttttgaaacactctttttggggaatccacaagtggatatttggaccgctttgagacctttgctggaaatgggaatatcttcacatataaactagacagaagcattctcagaaagttcttcgtgatgtgtgcattctactcccaaagttgaaccttccttttcataaggcagttttgaaacactccttttgtacaatctacaattggatatttggaacgctttgatgcccgtggtagaaaaggtaatgtcctcatataaaaactagacagaaggattcacagaaactgctgtgtgatgtgtgcatcgaaatcacggagttgaacttttcttttgttagagcagttttgaaaccctgtttccgtggaatctgccagtggacatttggagcgcattgagggctatggtggagaaggaaatatcttcacataaaaactagaaagaagcattctcagaaacatctatgtgaagtgtgcattcaactcacagagttgaaccttccttttgatagaagagttttgaaacactcttttgtacaattgcaggtgaatatttggagcgctttgaagcctttgttggaaatgggaatatcctcacataaaaactagccagaagcattctcagaaacttctttgtgatgtgtgcattgaacccagagagatgaaccatttctttgagagagcagttttgaaacgtgtttttgtaagatctgcaagtggatatttggggcgctttgagcccttaggtggaaacgggaatatcttcgaataaaaactagacagaaatattctcagaatcttctttgtgatgtgggcattcaactaacacagttgaacatttcttttgacagagcagttttgaaacacacttttagtagaatctgccagtggatatttggggcgctttgagggctattgtgcaaatggaaatatcttcacctaaatactagacagaagcattctcagaaactacgttgtgatgtttgcattcaactcacagtgttgaacatacatcttcatagagcagttttgaaaacctcttttggtagaatctgcaagtggatattttgaccactttgaggccttcataggaaacagtaatatcttcacataaaaactagatggaagcattctcagaaacttctttgtgatgtgtgaattcaactcacagagttgaaccttcctttaatagagcagttttgaaacactctttttgtagaatctgccagtagatatttggagcgctttcaggccttcgttggaaaccggaatatcttcacataaaaagtagatagaggcattctcagaaacttttttgtgatatgtagattcaactcagagcgttgaacctttcttttgatagagcagttttgaaaaactcttttatcgaatctgcaagtagacatttggagtgctttgagggctgtggtcgaaaaggaaatatcttcacatagaaactagactgaagcattctcagcaacttctttgtgacgtttgcattcatctcacagtgttgaacataccttttcatagagcagttttgaaacactatttttgtagtatctgcaagtggatatttggactgctttgaggccttcattggaaacgggaatatattcacataaacactagacagaagcattctctgaaacttctttgtgatgtgtgtattcaactcacagagttgaaccatcttttttatggagcggttttgaaacagtgtttttgtagaatcagcaattggatatttggagcgctttgaggcctctggtggaaagggaatgtcttcacataaaaactggacagaagcattctcagaaacatctttgtgatgtttccattcaactcacagagttgatccttccttttaatagggcagttttgcaacactctttttgtacaatgcaccagtgggcttttggagcacgtcaagggctatggtgaaaaaggaaatatcttcacataaaaactagacagaagtattgtgtaaaactcctttgtgatgtttgcattcaactcagaaagttgaacttctctttatatagtccagttttcaaacactatttttgtagaatctgcaagtggatactgggactgctttgaggccttcattggaaacgggattatcttcacataaaaactagactgaaggattcttagaaacttctttgtgatgtgtgcattcaactcaccgagtggaacctcacttttgatagagcagtgttgaaagacacttgttgtagaatctgcaggtggatatttggagtgctttgaagacttccttggaaacgggaatatcttcacataaaaactagacataagcattctcagaaacttctttgtgatctgtccattcaactcacagagttgaaccttcctttttatggagccgttttgaaacactgtttttgtagaatctgcaagtggatatttggagcgctttgaggcctatggtagagaaagaaatatctgcatatcaaaactagacagaagcattctgagaaacttctttgtgatgtttgcattcaactaccagagttgaacattcctttttgatagagcagttttgaaacactctttttgtagaatctgcatgtggatatctggagcgatttgaggcctatggtcaaaaaggaaatatcttcctatgaaaaacagacaaaagcattctcagaaactacttagagatatgtgcattcaactcacagagttgaaacttttttttgatagagcagttttgaaacactctgtagaatctgaaagtggatatttggagctatttgaggggctatggtggaaaagaaaatatattcccattaaactagacagaagcatcctcagaaacttctttatgatgtttgcattaaactcacagagttgaacacaccattccatagagcagttttgaaacactctttttggggaatccgcaagtggatatttggaccgctttgagacctttgctggaaatgggaatatcttcacatataaactagacagaagcattctcggaaacttcttcgtgatgtgtgcattctgctcccaaagttgaaccttccttttcataaagcagttttgaaacactcttttgtacaatctaccattggatatgtggaaggctttgatgcccatggtagaaaaggatacatcctcatataaaatctagacagaatgattcacagaaactgctttgtgatgtgtgcattcaaatcacggagttggacctttcttttattagagcagttttgaaacactgtttctgtggaatctgccagtggacatttggagcgcattgagggctatggtggagaaggaaatatcttcacataaaaactagaaagaagcattctcagaaacacctatgtgaagtgtgcattcaactcacagagttgaaccgttcttttgatagaagagttttgaaacactcttttgtacaattgcaggtgaatatttggagcgctttgaagcctttgttggaaatgggaatatcctcacataaaaactagccagaagcattctcagaaacttctttgtgatgtgtgcgttgaacccagagagatgaacctttcctttgatagagcagttttgaaacgtgtttttgtaagatctgcaagcggataattggcttcgctttgtgtcctttggtggaaacgggaatatcttctaataaaaactagacagaattattctcagaatcttctttgtgatgtgggcattcaactaacacagttgaacatttcttttgacagagcagttctgaaacactctttttgtagaatccgccagtggatatttggagcgctttgagggcaattgtgcaaatggaaatatcttcacctaaaaactagaccgaagcattctcagaaactgctttgtgatgtttgcattcaactcacagagttgaacatacctcttcatagagcagttttgaaaacccctttttgtagaatctgcaagtggatatttggaccactttgaggccttcatagaaaacagtaatatcttcacataaagactagatggaagcattctcagaaacttctttgtgatgtgtgaattcaactcacagagtggaaccttcctttaacagagcagttttgaaacactctttttgtagaatctgcaagtagatatttggagcgctttgaggccttcgttggaaaccggaatgtcttcacataaaaagtagatagagtcattctcagaaacttttttgtgatatgtagattcaactcacagcgttgaacctttcttttgatagagcagttttgaaaaactcttttatcgagtctgcaagtagacatttggagtgctttgagggctgtggtcgaaaaggaaatatcttcacatagaaactagactgaagcattctcagcaacttctttgtgacgtttgcattcatctcacagtgttgaacataccttttcatagagcagttttgagacactatttttgtagtatctgcaagtggatatttggactgctttgaggccttcattggaaacgggaatatcttcacataaacactagacagaagcattctctgaaacttctttgtgatgtgtgtattcaactcacagagttgaaccatcttttttatggagcggttttgaaacagtgtttttgtagaatcagcaagtggatattgggagcgctttgaggcctctggtggaaagggaatgtcttcacataaaaactggacagaagcattctcagaaacatctttgtgatgtttgcattcaactcacagagttgatccttccttttaatagggcagttttgcatcactctttttgtagaatgcaccagtgggcttttggagcacgtcaagggctatggtgaaaaaggaaatatcttcacataaaaactagacagaagtattctgtaaaactcctttgtgatgtttgcattcaactcagaaagttgaacttctctttatatagtccagttttcaaacactatttttgtagaatctgcaagtggatactgggactgctttgaggccttcgttggaaacgggtatcttcacataaaaactagactgaaggattcttagaaacttctttgtgatgtgtgcattcaactcaccgagtggaacctcacttttgatagagcagtgttgaaagacacttgttgtagaatctgcaggtggatatttggagtgctttgaagccttccttggaaacgggaatatcttcacataaaaactagacataagcattctcagaaacttctttgtgatctgtccattcaactcacagagttgaaccttcctttttatggagcagttttgaaacactgtttttggagaatctgcaagtggatatttggagcacttttaggcctatggtagaaaaagaaatatctgcctattacaactagactgaagcattctcagaaactgctttgtgatatgtgcattcgactctccgagttgaaacttttttttgatagagcagttttgaaacactctgtagaatctgaaagtggatatttggagctctttgagggctatggcggaaaagaaaatatattcacattaaactagacagaagcatcctcagaaacttctttatgatgtttgcattcaactcacagagttgaacatacctttccatagagcagttttgaaacactctttttggggaatccgcaagtggatatttggaccgctttgagacctttgctggaaatgggaatatcttcacatataaactagacagaagcattcttggaaacttcttcgtgatgtgtgcattctgctcccaaagttgaacgttccttttcataaagcagttttgaaacactcttttgtacaatctaccattggatatgtggaaggctttgatgcccatggtagaaaaggaaacatcctcatataaaatctagacagaaggattcacagaaactgctttgtgatgtcagcattcaaatcacagagttgaacctttcttttgttagagcagttttgaatcgctgtttctgtggaatctgccagtggacatttggagcccattgagggcaattgtggagaaggaaatatcttacataaaaactagaaagaagcattctcagaaacatctatgtgaagtgtgccttcaacacacagagttgaaccttccctttgacagaacagttttgaaactcacttttgtacaattgcaggtgaatatttggagcgccttgaagcctttgttggaagtgggaatatcttcacatacaaactagccagaagcattctcagaaacttctttgtgatgtgtgcattgaacccagagagatgaacctttcctttgatagagcagttttgaaacgtgtttctgtaagatctgcaagtggatatttggggcgctttgagtcctttggtggaaacgggaatatcttctaataaaaactagacagaaatattctcagaatcttctttgtgatgtgggcattcaactaacacagttgaacatttcttgtgacagagcagttttgaaacactctttttgtagaatctgccagtggatatttggagcgctttcagggctattgcacaaatggaaaagtcttcacataaaaactagacagaagcattctcagaaacttctttgtgatgtttgcattcaaataccagagttgaacctccctcttcatagagcagttttgaaatcctctttttgtagaatctgcaagtggatatttggaccactttgaggccttcataggaaacagtactatcttcacataaaaactagatagaagcattctcagaaacttctttgtgatgtgtgaatttaactgagagagttgaaccttgctttaatagagcagttttgaaacactctttttgtagaatctgcaagtagatatttggagcgctttgagaccttcgttggaaaccggaatatcttcacataaaaagtagatagaggcattctcagaaacttttttgttatatgtagattcaactcacagtgttgaagctttcttttgatagagcagtttttaagaactcttttatcgaatctgcaagtagacatttggagtgctttgagggctgtagtcgaaaaggaaatatcttcacatagaaactagactgaagcattctcagcaacttctttgtgacgtttgcattcatctcacagtgttgaacataccttttcatagagcagttttgaaacactatttttgtagtatctgcaagtggatatttggactgctttgaggcctcattggaaacgggaatatcttcacataaacactagacagaagcattctctgaaacttctttgtgatgtgtgtattcaactcacagagttgaaccatcttttttatggagcggttttgaaacagtgtttttgtagaatcagcaagtggatattgggagcgctttgaggcctctggtggaaagggaatgtcttcacataaaaactggacagaagcattctcagaaacatctttgtgatgtttgcattcaactcacagagttgatccttccttttaatagggcagttttgcaacactctttttgtagaatgcaccagtgggcttttggagcacgtcaagggctatggtgaaaaaggaaatatcttctcataaaaactagactgaagtattctgtaaaactcctttgtgatgtttgcattcaactcagaaagttgaacttctctttatatagtccagttttcaaacactatttttgtagcatctgcaagtggatactgggactgctttgaggccttcgttggaaacgggattacccgtcacatagaaactagactgaaggattcttagaaacttctttgtgatgtgtgcattcaactcaccgagtggaacctcacttttgatagagcagtgttgaaagacacttgttgtagaatctgcaggtggatatttggagtgctttgaaaccttccttggaaacgggaatatcttcacataaaaactagacataagcattctcagaaacttctttgtgatctgtccattcagctcacagagttgaaccttccttttgatagagcagttttgaaacactctttctgtagagtctgcaagtggatatcaggagcgctttgaggcctatggtagaaaaagaaatatctgcatataaaaactagacagaagcattctgagaaacttctttgtgatgtttgcattcaactaccagagttgaaccttccttttgatagagcagttttgaaacactctttgtgtagaatctgcatgtggatatcaggagcgctttgaggcctatggcagaaaaagaaatatctggctctaaaaactagacagaagcattctcagcaaactactttgagatatgtgcattcaactcacagagttgaaacttttttttgatagagcagttttgaaacactctgtagaatctgaaagtggatatttggagctatttgagggctatggtggaaaagaaaatatattcccattaaactagacagaagcatcctcagaaacttctttatgatgtttgcattaaactcacagagttgaacatacctttccatagagcagttttgaaacactctttttggggaatccgcaagtggatatttggaccgctttgagacctttgctggaaatgggaatatcttcacatataaagtagacagaaccattctcagaaactgctacgtgatgtgtgcattcaactcacagagttgaaccttccttttcataaagcagttttgaaacactccttttgtacaatctacaattggatatttggaacgctttgatgcccgtggtagaaaaggaaatctcctcatataaaaactagacagaaggattcacagaaactgctgtgtgatgtgtgcatccaaatcacggagttgaacttttcttttgttagagcagttttgaaaccccgtttccgtggaatctgccagtggacatttggagcgcattgagggctatggtggagaaggaaatatcttcacataaaaactagaaaggaagcattctcagaaacatctatgtgaagtatgcattcaactcacagagttgaaccttccttttgatagaagagttttgaaacactcttttgtacaattgcaggtgaatatttggagcgctttgaagcctttgttggaaatgggaatatcctcacattaaaaactagccagaaacattctcagaaacttctttgtgatgtgtgcattgaacccagagagatgaaccgttcctttgagagagcagttttgaaacgtgtttttgtaagatctgcaagtggatatttggggcgctttgagtccttaggtggaaacgggaatatcttcgaataaaaactagacagaattattctcagaatcttctttgtgatgtgggcattcaactaacacagttgaacatttcttttgacagagcagttctgaaacactctttttgtagaatccgccagtggatatttggagcgctttgagggctattgtgcaaatggaaatatcttcaactaaaaactagaccgaagcattctcagaaactgctttgtgatgtttgcattcaactcacagagttgaacctacctcttcatagagcagtttggaaaacctcttcttgtagaatctgcaagtggatattcggaccactttgaggccttcataggaaacagtaatatcttcacataaaaactagatagaagcattctcggaaacttcttagtgatgtgtgaattcaactcacagagttgaaccttcgttaaatagagcagttttgaaacactctttttgtggaatctgcaatagatatttggagcgctttgaggccttcgttggaaaccggaatgtcttcacataaaaagtagatagaggcattctcagaaacttttttgtgatatgtagattcaactcacagtgttgaacctttcttttgattgagctgttttgaaaaactcttttatcgaatctgtaagtagacatttggagtgctttgagggctgtggtcgaaaaggaaatatcttcccatagaaactagactgaagcattctcagcaacttcttggtgacgtttgcattcatctcacagtgttgaacataccttttcatagagcagttttgaaacactatttttgtagtatctgcaagtggatatttggactgctttgaggccttcattggaaacgggaatatcttcacataaacactagacagaagcattctctgaaacttctttgtgatgtgtgtattcaactcacagagatgaaccatcttttttatggagcggttttgaaacagtgtttttgtagaatcagcaagtggatattgggagcgctttgaggcctctggtggaaagggaatgtcttcacataaaaactggacagaagcattctcagcaacatctttgtgatgtttgcattcaactcacagagttgatccttccttttaatagggcagttttgcaacactctttttgtagaatgcaccagtgggcttttggagcacgtcaagggctatggtgaaaaaggaaatatcttcacataaaaactagacagaagtattgtgtaaaactcctttgtgatgtttgcattcaactcagaaagttgaacttctctttatatagtccagttttcaaacactatttttgtagaatctgcaagtggatactgggactgctttgaggccttcattggaaacgggattatcttcacataaaaactagactgaaggattcttagaaacttctttgtgatgtgtgcattcaactcaccgagtggaacctcacttttgatagagcagtgttgaaagacacttgttgtagaatctgcaggtggatatttggagtgctttgaagccttccttggaaacgggaatatcttcacataaaaactagacataagcattctcagaaacttctttgtgatctgtccattcaactcacagagttgaaccttcgttcatatggagccgttttgaaccactgtttttgtagaatctgcaagtggatatttggagcgctttgaggcctatggtagaaaaggaaatatctgcctctaaaaactagacagaagcattctcagaaacttgtttgtgatgtttgccttcaacttccagagttgaaccttccttttgatagagcagttttgaaacactctttttgtagaatctgcatgtggatatctggagcgatttttgaggcctatggtcaaaaaggaaatatcttcctatgaaaaatagacaaaagcattctcagaaactactttgagatatgtgcatttaacccacagagttgaaacttttttttgatagagcagttttgaaacactctgtaaaatctgaaagtggatatttggagctatttgagggctatggtggaaaagaaaatatattcccattaaactagacagaagcatcctcagaaacttctttgtgatgtttgcattaaactcacagagttgaacatacctttccatagagcagttttgaaacactctttttggggaatccgcaagtggatatttggaccgctttgagacctttgctggaaatgggaatatcttcacatataaactagacagaagcattctcggaaacttctttgtgatgtgtgcattctgctcccaaagttgaaccttcctcttcataaagcagttttgaaacactcttttgtacaatctaccattggatatgtggaaggctttgatgcccatggtagaaaaggaaacatcctcatataaaatctagacagaaggattcacagaaactgctgtgtgatgtgtgcatccaaatcacggagttgaacgtttcttttgttagagcagttttgaaaccctgtttccgtggaatctgccagtggacatttggagcgcattgagggctatggtggagaaggaaatatcttcacataaaaactagaaagaagcattctcagaaacatctatgtgaagtgtgcattcaactcacagagttgaaccttccttttgatagaagagttttgaaacactcttttgtacaattgcaggtgaatatttggagcgcttagaagcctttgttggaaatgggaatatcctcacataaaaactagccagaagcattctcagaaacttctttgtgatgtgtgcattgaacccagagagatgaaccgttcctttgagagagcagttttgaaacgtgttcttgtaagatctgcaagtggatatttggggcgctttgagcccttaggtgtaaacgggaatatcttcgaataaaaactagacagaattattctcagaatcttctttgtgatgtgggcattcaactaacacagttgaacatgtcttttgacagagcagttctgaaacactctttttgtagaatccgccagtggatatttggagcgctttgagggctattgtgcaaatggaaatatcttcacctaaaaactagaccgaagcaatcccagaaactactttgtgatgtttgcattcaactcacagagttgaacctacctcttcatagagcagtttggaaaacctctttttatagaatctgcaagtggatatttggaccactttgaggccttcataggaaacagtactatcttcacataaaaactaggtagaagcattctcagaaacttctttgtgatgtgtgaattcaactcacagagttgaaccttcctttaatagagcagttttgaaacactctttttgtagaatctgccagtagatatttggagcgctttgaggccttcgttggaaaccggaatatcttcacataaaaagtagatagaggcattctcagaaacttttttgtgatatgtagattcaactgacagcgttgaacctttcttttgatagagcagttttgaaaaactcttttctcgaatctgcaagtagacatttggagtgctgtgagggctgtggtccaaaaggaaatgtcttcacaaagaaaccagactgaagcattctcagcaacttctttgtgacgtttgcattcatctcacagtgttgaacataccttttcatagagcagttttgagacactatttttgtagtatctgcaagtggatatttggactgctttgaggccttcattggaaatgggaatatcttcacataaacactagacagaagcattctctgaaacttctttgtgatgtgtgtattcaactcacagagttgaaccatcttttttatggagcggttttgaaacagtgtttttgtagaatcagcaattggatattgggagcgctttgaggcctctggtggaaagggaatgtcttcacataaaaactggacagaagtattctcagaaacatctttgtgatgtttgcattcaactcacagagttgatccttcctttcaatagggcagttttgcaacactctttttgtagaatgcaccagtgggcttttggagcacgtcaagggctatggtgaaaaaggaaatatcttcacataaaaattagacagaagtattctgtaaaactcctttgtgatgtttgcattcaactcagaaagttgaacttctctttatatagtccagttttcaaacactatttttgtagaatctgcaagtggatactgggactgctttgaggccttcattggaaacgggattatcttcacataaaaactagactgaaggattcttagaaacttctttgtgatgtgtgccttcaactcaccgagtggaacctcacttttgatagagcagagttgaaagacacttgttgtagaatctgcaggtggatatttggagtgttttgaagccttccttggaaacgggaatatcttcacataaaaactagacataagcattctcagaaactcctttgtgatctgtccattcagctcacagagttgaaccttccttttgatagagcagttttgaaacactctttctgtagagtctgcaagtggatatcaggagcgctttgtcgcctatggcagaaaaagaaatatctggctctaaaaactagacagaagcattctgagaaacttctttgtgatgtttgcattcaactaccagagttgaaccttccttttgatagagcagttttgaaacactctttgtgtaggatctgcatgtggatatcaggagcgctttgaggcctatggcagaaaaagaaatatctggctctaaaaactagacagaagcattctcagaaactactttgtgttatgtgcattcaactcacagagttgaaccttttttttgatagagccgttttgaaacactctgtagaaactgaaagtggatatttggagctatttgagggctatggtggaaaagaaaatatattcacattaaactagacagaagcattctcagaaacttctttatgatgtttgcattaaactcacagagttgaacatacctttccatagagcagttttgaaacactctttttgtggaatccgcaagtggatatttggaccgctttgagaccttcgctggaaatgggaatatcttcacatacaaattagacagaagcattctcggaaacttcttcgtgatgtgtgcattctgctcccaaagttgaaccttcctcttcataaagcagttttgaaacactcttttgtacaatctaccattggatatggggaaggctttgatgcccatggtagaaaaggaaacatcctcatataaaatctagacagaaggattcacagaaactgctgtgtgatgtgtgcatcgaaatcacggagttgaacttttcttttgttagagcagttttgaaaccctgtttccgtggaatctgccagtggacatttggagcacattgagggctatggtggagaaggaaatatcttcacataaaaactagaaagaagcattctcagaaacatctatgtgaagtgtgcattcaactcacagagttgaaccttccttttgatataagagttttgaaacactcttttgtacaattgcaggtgaatatttggagcgctttgaagcctttgttggaaatgggaatatcctcacataaaaactagccagaagcattctcagaaacttctttgtgatgtgtgcattgaacccagagagatgaaccgttcctttgagagagcagttttgaaacgtgttcttgtaagatctgcaagtggatatttggggcgctttgagccgttaggtgtaaacgggaatatcttcgaataaaaactagacagaattatctcagaaccttctttgtgatgtgggcattcaactaacacagttgaacatttcttttgacagagcagttctgaaacactctttttgtagaatccgccagtggatatttggagcgctttgagggctattgtgcaaatggaaatatcttcacctaaaaactagaccgaagcaatcccagaaactactttgtgatgtttgcattcaactcacagagttgaacctacctcttcatagagcagtttggaaaacctctttttgtagaatctgcaagtggatattcggaccactttgaggccttcataggaaacagtactatcttcacataaaaactaggtagaagcattctcagaaaattctttgtgatgtgtgaattcaactcacagagttgaaccttcctttaatagagcagttttgaaacactctttttgtagaatctgcaagtagatatttggagcgctttgaggccttcgttggaaaccggaatatcttcacataaaaagtagatagaggcattctcagaaagttttttgtgatatgtagattcaactcacagcgctgaacctttcttttgatagagcagttttgaaaaactcttttatcgaatctgcaagtagacatttggagtgctttgagggctgtggtcgaaaaggaaatatcttcacatagaaactagactgaagcattctcagcaacatctttgtgatgtttgcattcatctcacagtgttgaacataccttttcatagagcagttttgaaacactatttttgtagtatctgcaagtggatatttggactgctttgaggccttcattggaaacgggaatatcttcacataaacactagacagaagcattctctgaaacttctttgtgatgtgtgtattcaactcacagagttgaaccatcttttttatggagcggttttgaaacagtttttgtagaatcagcaattggatatttggagtgctttgaggcctctggtggaaagggaatgtcttcacataaaaactggacagaagcattctcagaaacatctttgtgatgtttgcattcaactcacagagttgatccttccttttaatagggcagttttgcaacactctttttgtagaatgcaccagtgggcttttggggcacgtcaagggctatggtgaaaaaggaaatatcttcacataaaaactagacagaagtattgtgtaaaactcctttgtgatgtttgcattcaactcagaaagttgaacttctctttatatagtccagttttcaaacactatttttgtagaatctgcaagtggatactgggactgctttgaggctatcgttggaaacaggattatcttcacataaaaactagactgaagcattctcagcaacttctttgtgacgtttgaattcatctcacagtgatgaacataccttttcatagagcagttttgaaacactatttttgtagaatctgcaattggatatttggactgcgttgagcccctcactggaaacgggaatatcttcacataaaaactagacagatgtattctcagaaacttccttgtgatctgtccattaaactcacagagttgaaccttccgttttatggagccgttttgaaacactgtttttgtagaatctgcaagtggatatttggagcgctttgaggcctaaggtagaaaaagaaatatctgcatataaaaactagacagaagcattctgagaaacttctttgtgatgtttgcattcaactaccagagttgaaccttccttttgatagagcagtttcgaaacactctttttgtagaatctgcatgtggatatctggagcgatttgaggcctatggtcaaaaaggaaatatcttcctatgaaaaacagacaaaaacattctcagaaactactttgtgttatgtgcattcaactcacagagtagaaccttttttttgatatagccgttttgaaacgctctgtagaaactgaaagtggatatttggagctatttgagggctatggtggaaaagaaaatatattcacattaaactagacagaagcatcctcagaaacttctttatgatgtttgcattaaactcacagagttgaacatacctttccatagagcagttttgaaacactgtttttggggaatccgcaagtggatatttggaccgctttgagacctttgctggaaatgggaatatcttcacatataaactagacagaagcattttcggaaacttcttcctgatgtgtgcattctgctcccaaagttgaaccttcctcttcataaagcagttttgaaacactcttttgtacaatctaccattggatatgtggaaggctttgatgcccatggtagaaaaggatacatcctcatataaaatctagacagaaggattcacagaaactgctgtgtgatgtgtgcatccaaatcacggagttgaacttttcttttgttagagcagttttgaaaccctgtttccgtggaatctgccagtggacatttggagcgcattgagggctatggtggagaaggaaatatcttcacataaaaactagaaagaagcattctcagaaacacctatgtgaagtgtgcattcaactcacagagttgaaccgttcttttgatagaagagttttgaaacactcttttgtacaattgcaggtgaatatttggagcgctttgaagcatttgttggaaatgggaatatcctcacataaaaactagccagaaacattctcagaaacttctttgtgatgtgtgcattgaacccagagagatgaaccgttcccttgagagagcagttttgaaacgtgtttttgtaagatctgcaagtggatatttggggcgctttgagtccttaggtggaaacgggaatatcttcgaataaaaactagacagaattattctcagaatcttctttgtgatgtgggcattcaactaacacagttgaacatttcttttgacagagcagttctgaaacactctttttgtagaatccgccagtggatatttggagcgctttgagggctattgtgcaaatggaaatatcttcacctaaaaactagaccgaagcaatcccagaaactactttgtgatgtttgcattcaactcacagagttgaacctacctcttcatagagcagtttggaaaacctctttttgtagaatctgcaagtggatatttggaccacattgaggccttcataggaaacagtactatcttcacataaaaactaggtagaagaattctcagaaagttctttgtgatgtgtgaattcaactcacagagttgaaccttcctttaatagagcagttttgaaacactctttttgtagaatctgccagtagatatttggagcgctttgaggccttcgttggaaaccggaatatcttcacataaaaagtagatagaggcattctcagaaacttttttgtgatatgtagattcaactcacagcgctgaacctttcttttgatagagcagttttgaaaaactcttttatcgaacctgcaagcagacatttggagtgctttgagggctgtggtcgaaaaggaaatatcttcacatagaaactagacagaagcattctcagcaacttctttgtgacgtttgcattcatctcacagtgttgaacataccttttcatagagcagttttgaaacactatttttgtagtatctgcaagtggatatttggactgctttgaggccttcattggaaacgggaatatcttcacatatactctagacagaagcattctctgaaacttctttgtgatgtgtgtattcaactcacagagttgaaccatcttttttatggagcggttttgaaacagtgtttttgtagaatcagcaagtggatatttggagcgctttgaggcctctggtggaaagagaatgtcctctcataaaaactggacagaagcattctcagaaacatctttgtgatgtttgcattcaactcacagagttgatccttccttttaatagggcagttttgcaacactctttttgtagaatgcaccagtgggcttttggagcacgtcaagggctttggtgaaaaaggaaatatcttcacataaaaactagacagaagtattctgtaaaactcctttgtgatgtttgcattcaactcagaaagttgaacttctctttatatagtccagttttcaaacactatttttgtagaatctgcaagtggatactgggactgctttgaggccttcgttggaaacgggattatcttcacatagaaactagactgaaggattcttagaaacttctttgtgatgtgtgccttcaactcaccgagcggaacctcacttttgatagagcagagttgaaagacacttgttgtagaatctgcaggtggatatttggagtgttttgaagccttccttggaaacgggaatatcttcacataaaaactagacataagcattctcagaaacccctttgtgatctgtccattcagctcacagagttgaaccttccttttgatagagcagttttgaaacactctttctgtagagtctgcaagtggatatcaggagcgctttgaggcctatggtagaaaaagaaatatctgcatataaaaactagacagaagcattctgagaaacttctttgtgatgtttgcattcaactaccagagttgaaccttccttttgatagagcagttttgaaacactctttttgtagaatctgcatgtggatatctggagcgatttgaggcctatggtcaaaaaggaaatatcttcctatgaaaaacagacaaaagaattctcagaaactacttagagatatgtgcattcaactcacagagttgaaacttttttttgatagagcagttttgaaacactctgtagaatctgaaagtggatatttggagctatttgagggctatggtggaaaagaaaatatattcccattaaactagacagaagcatcctcagaaacttctttatgatgtttgcattaaactcacagagttgaacatacctttccatagagcagttttgaaacactctttttggggaatccgcaagtggatatttggactgctttgagacctttgctggaaaagggaatatcttcacatataaactagacagaagcattctcagaaacttcttcgtgatgtgtgcattctactcccaaatttgaatcttccttttcatgaagcagttttgaaacactctatttgtgcattctacaattggatgattggaacgctttgatgcccatggtagaaaaggaaatatcctcatataaaaactagacagaaggattcacagaaactgctttgtgatgtgtgcattcaaatcacggagttggacctttcttttgttagagcagttttgaaacactgtttctgtggaatctgccagtggacatttggagcgcattgagggctatggtggagaaggaaatatcttcacagaaaaactagaaagaagcattctcagaaacatttatgtgaagcgtgcattcaactcacagagttgaaccttccttttgatagaacagttttgaaacactcttttgaacaattgcaggtgaatctttggagcgctttgaagcctttgttggaaatgggaatatcttcacacacaaactagccagaagtactctcagaaacttctttgtgatgtgtgcattgaacccagagagatgaaccgttcctttgagagagcagttttgaaacgtgtttttgtaagatctgcaagtggatatttggggcgctttgagcccttaggtggaaacgggaatatcttcgaataaaaactagacagaattattctcagcaatcttctttgtgatgtgggcattcaactaacacagttgaacatttcttttgacagagcagttctgaaacactctttttgtagaatccgccagtggatatttggagcgctttgagggctattgtgcaaacggaaatatcttcacctaaaaactagaccgaagcattctcagaaactactttgtgatgtttgcattcaactcacatagttgaacatacctcttcatagagcaggtttgaaaacttctttttgtattatctgcaagtggatatttggaccactttgaggccttcataggaaacagtaatatattctcataaaaactcgatagaagcattctcagaaacttctttgtgatgggtgaattcaactcacagtgttgaaccttcctttaatagagcagttttgaaacactctttttgtagaatctgccagtagatatttggagcgctttgaggccttcgttggaaaccggaatatcttcacataaaaagtagatagaggcattctcagaaacttttttgtgatatgtagattcaactcacagcgctgaacctttcttttgatagagcagttttgaaaaactattttatcgaatctgcaagtagacatttggagtgctttgagggctgtggtcgaaaaggaaatatcttcacatagaaactagactgaagcattctcagcaacttctttgtgacgtttgaattcatctcacagtgttgaacataccttttcatagaacagttttgaaacactatttttgtagaatctgcaattggatatttggactgcgttgagcccctcactggaaacgggaatatcttcacataaaaactagacagaagcattctctgaaacttctttgtgatgtgtgtattcatctcacagagttgaaccatcttttttatggagcggttttgaaacagtgtttttgtagaatcagcaattggatatttggagcgctttgaggcctctggtggaaagggaatgtcttcacataaaaactggacagaagcattctcagaaacatctttgtgatgtttgcattcaactcacagagttgatccttccttttaatagggcagttttgcaacactctttttgtagaatgcaccagtgggcttttggagcacgtcaagggctatggtgaaaaaggaaatatcttcacataaaaactagacagaagtattctgtaaaactcctttgtgaagtttgcattcaactcagaaagttgaacttctctttatatagtccagttttcaaacactatttttgtagaatctgcaagtggatactgggactgctttgaggccttcgttggaaacgggattatcttcacataaaaactagactgaagcattctcagcaacttctttgtgacgtttgcattcatctcacaatgttgaacatactttttcatagagcagtattgaaacactctttttgtaaaatctgcatttggatatttggactgcgttgaggccttcactggaaacgggaatttcttcacataaacactagacagaagcattctcagaaacttctttgtgatctgtccattcaactcacagagttgaaccttcgttcatatggagccgttttgaaccactgtttttgtagaatctgcaagtggatatttggagcgctttgaggcctatggtagaaaaggaaatatgtgcctctaaaaactagacagaagcattctgagaaacttctttgtgatgtttgcattcaactaccagagttgaaccttcctttttgatagagcagttttgaaacactctttttgtagaatctgcatgtggatatctggagcgatttgaggcctatggtcaaaaaggaaatatcttcctatgaaaaacagacaaaatcaatctgaggaacttctttgtgatgtgtgcattcgtcccacagagttaaacctttcttttgattgagaagttttgagactctttttgtagtacctggaagtggacatttcgaaggccttgaggcctatggtggaaaaggaaatatcttctcataaaaactagactgaagcatcctcagaaacttctttatgatgtttgcattaaactcacagagttgaacatacctttccatagagcagttttgaaacactctttttggggaatccgcaggtggatatttggaccgctttgagacctttgctggaaacgggaatatcttcacatataaactagacagaagcattctcggaaacttcttcatgatgtctgcattctgctcccaaagttgaaccttccttttcataaagcagttttgaaacactcttttgtacaatctaccattggatatgtggaaggctttgatgcccatggtagaaaaggaaacatcctcatataaaatctagacagaaggattcacagaaactgctgtgtgatgtgtgcatccaaatcacggagttgaacttttcttttgttagagcagttttgaaaccctgtttccgtggaatctgccagtggacatttggagcgcattgagggctatggtggagaaggaaatatcttcacataaaaactagaaagaagcattctcagaaacatctatgtgaagtgtgcattcaactcacagagttgaaccttccttttgatagaagagttttgaaacactcttttgtacaattgcaggtgaatatttggagcgctgtgaagcctttgttggaaatgggaatatcctcacataaaaactagccagaagcattctcagaaacttctttgtgatgtgtgcattgaacccagagagatgaaccgttcctttgagagagcagttttgaaacgtgtttttgtaagatctgcaagtggatatttggggcgctttgagtccttaggtggaaacgggaatatcttcgaataaaaactagacagaattattctcagaatcttctttgtgatttgggcattcaactaacacagttgaacatgtcttttgacagagcagttctgaaacactctttttgtagaatccgccagtggatatttggagcgctttgaggggtattgtgcaaatggaaatatcttcacctaaaaactagaccgaagcaatcccagaaactactttgtgatgtttgcattcaactcacagagttgaacctacctcttcatagagcagtttggaaaacctctttttgtagaatctgcaagtggatatttggaccactttgaggccttcataggaaacagtactatcttcacataaaaactaggtagaagcattctcagaaacttctttgtgatgtgtgaattcaactcacagagttgaaccttcctttaatagagcagttttgaaacactctttttgtagaatctgcaagtagatatttggagcgcttagaggccttcgttggaaaccggaatatcttcacatagaaagtagatagaggcattctcagaaacttttttgtgatatgtagattcaactcacagcgttgaacctttcttttgatagagcagttttgaaaaactcttttatcgaatctgcaagtagacatttggagtgctttgagggctgtggtcgaaaaggaaatatcttcacatagaaactagactgaagcattctcagcaacttctttgtgacgtttgcactcatctcacaatgttgaacatactttttcatagagcagtattgaaacactctttttgtaaaatctgcatttggatatttggactgcgttgaggccttcactggaaacgggaatttcttcacataaacactagacagaagcattctctgaaacttctttgtgatgtgtgtattcaactcacagagttgaaccatcttttttatggagcggttttgaaacagtgtttttgtagaatcagcaattggatatttggagcgctttgaggcctctggtggaaagggaatgtcttcacataaaaactggacagaagcattctcagaaacatctttgtgatgtttgcattcaactcacagagttgatccttccttttaatagggcagttttgcaacactctttttgtagaatgcaccagtgggcttttggagcacgtcaagggctatggtgaaaaaggaaatatcttcacataaaaactagaccgaagtattctgtaaaactcctttgtgatgtttgcattcaactcagaaagttgaacttctctttatatagtccagttttcaaacactatttttgtagcatctgcaagtggatactgggactgctttgaggccttcgttggaaacgggattaccttcacatagaaactagactgaaggattcttagaaacttctttgtgatgtgtgccttcaactcaccgagtggaacctcacttttgatagagcagagttgaaagacacttgttgtagaatctgcaggtggatatttggagtgctttgaagccttccttggaaacgggaatatcttcacataaaaactagacataagcattctcagaaactcctttgtgatctgtccattcagctcacagagttgaaccttccttttgatagagcagttttgaaacactctttctgtagagtctgcaagtggatatcaggagcgctttgaggcctatggtagaaaaagaaatatctgcatataaaaactagacagaagcattctcagaaacttctttgtgatgtttgcattcaactaccagagttgaaccttccttttgatagagcagttttgaaacactctttttgtagaatctgcatgtggatatctggagcgatttttgagtcctatggtcaaaaaggaaatatcttcctatgaaaaatagacaaaagcattctcacaaagtgctttgtgatatgtgcattcgactcaccgagttgaaacttttttatgatagagcagttttgaaacactctgtagaatctgaaagtggatatttggagctcttcgagggctatggcggaaaagaaaatatattcacattaaactagacagcagcattctcagaaacatctttaggatgtttgcagtaaactcacagagttgaacatacctttccgtaaagcagttttgaaaccctctgtttgtgggatctgcaagtggatatttggaccgctttgagacctttgctggaaatgggaatatcttcacatataaactagacagaagcattctcggaaacttcttcatgatgtgtgcattctgctcccaaagttgaaccttccttttcataaagcagttttgaaacactcttttgtacaatctaccattggatatgtggaaggctttgatgcccatggtagaaaaggatacatcctcatatgaaaatctagacagaaggattcacagaaactgctgtgtgatgtgtgcatccaaatcacggagttgaacttttcttttgttagagcagttttgaaaccccgtttccgtggaatctgccagtggacatttggagcgcattgagggctatggtggagaaggaaatatcttcacataaaaactagaaagaagcattctcagaaacatctatgtgaagtgtgcattcaactcacagagttgaaccttccttttgatagaagagttttgaaacactcttttgtacaattgcaggtgaatatttggagcgctttgaagcctttgttggaaatgggaatatcctcacataaaaactagccagaagcattctcagaaacttctttgtgatgtgtgcattgaacccagagacatgaacctttcctttgatagagcagttttgaaacgtgtttctgtaagatctgcaagtggatatttggggcgctttgagtcctttggtggaaacgggaatatcttctaataaaaactagacagtattattctcagaatcttctttgtgatgtgggcattcaactaacacagttgaacatgtcttttgacagagcagttctgaaacactctttttgtagaatccgccagtggatatttggagcgctttgaggggtattgtgcaaatggaaatatcttcacctaaaaactagaccgaagcaatcccagaaactactttgtgatgtttgcattcaactcacagagttgaacctacctcttcatagagcagtttggaaaacctctttttgtagaatctgcaagtggatatttggaccactttgaggccttcataggaaacagtactatcttcacataaaaactaggtagaagcattctcagaaacttctttgtgatgtgtgaattcaactcacagagttgaaccttcctttaatacagcagttttgaaacactctttttgtagaatctgccagtagatatttggagcgctttgaggccttcgttggaaaccggaatatcttcacataaaaagtagatagaggcattctaagaaacatttttgtgatatgtagattcaactcacagcgttgaacctttcttttgatagagcagttttgaaaaactcttttatcgaatctgcaagtagacatttggagtgctttgagggctgtggtcgaaaaggaaatatcttcacatagaaactagactgaagcattctcagcaacttctttgtgacgtttgcattcatctcacagtgttgaacataccttttcatagagtagttttgaaacactatttttgtagaatctgcaagtggatatttggactgcattgaggccttcattggaaacgggaatgtcttcacataaacactagacagaagaattctgagaaacttccttctgatgtgtgcgttcatctcacagagtcgaacaattgttttgattgagcagtttggaaacactctttttgtagaatctgcaagtggacatttggagtgctttgtagcctacggcagaaaaggtaatgtcttcacatgaaatctagacagaagcattctcagaaacatctttgtgatgttgcattcaactcacagagttgatccttccttttaatagggcagttttgcaacactctttttgtagaatgcaccagtgggcttttggagcacgtcaagggctatggtgaaaaaggaaatatcttcacataaaaactagacagaagtattctgtaaaactcctttgtgatgtttgcattcaactcagaaagttgaacttctctttatatagtccagttttcaaacactatttttgtagaatctgcaagtggatactgggactgctttgaggccttcgttggaaacgggattatcttcacataaaaactagactgaaggattcttagaaacttctttgtgatgtgtgcattcaactcaccgagtggaacctcacttttgatagagcagtgttgaaagacacttgttgtagaatctgcaggtggatatttggagtgctttgaagccttccttggaaacgggaatatcttcacataaaaactagacataagcattctcagaaactcctttgtgatctgtccattcagctcacagagttgaaccttccttttgatagagcagttttgaaacactctttctgtagtgtctgcaagtggatatcaggagcgctttgaggcctaggcagaaaaagaaatatctgtatataaaaactagacagaagcattctgagaaacttctttgtgatgtttgcattcaactaccagagttgaaccttcctttttgatagagcagttttgaaacactctttgtgtagaatctgcatgtggatatctggagcagatttgaggcctatggtcaaaaaggaaatatcttcctatgaaaaacagacaaaagaaatctgagaaaatactttttgatgtgtgtgttcatctcacagacttgaatcttttttttgattgagcagtttggaaatactctgttttctagaatctgcaagtggacatttggaacgctttgcggcttaaggtagaaaaggaaatatcttcaaataaaatctagacagaagcatcctcagaaacttctttatgatgtttgcattaaactcacagagttgaacatacctttccatagagcagttttgaaacactctttttgaggaatccgcaagtggatatttggaccgctttgagacctttgctggaaatgggaatatcttcacatataaactagacagaagcattctcggaaacttcttcgtgatgtgtgcattctgctcccaaagttgaaccttcctcttcataaagcagttttgaaacactcttttgtacaatctaccattggatatgtggaaggctttgatgcccatggtggaaaaggaaacatcctcatataaaatctagacagaaggattcacagaaactgctgtgtgatgtgtgcatccaaatcacggagttgaacttttcttttgttagagcagttttgaaaccctgtttccgtggaatctgccagtggacatttggagcacattgagggctatggtggagaaggaaatatcttcacataaaaactagaaagaagcattctgagaaacatctatgtgaagtgtgcattcaactcacggagttgaaccttccttttgatagaacagttttgaaacattcttttgtacaatttcaggtgaatatttggagcgcctttaagcctttgttggaaatgggaatatcttcacatacaaactagccagaagcactctcagaaacttctttgtgatgtgtgcattgaacccagagagatgaaccgttcctttgagagagcagttttgaaacgtgtttttgtaagatctgcaagtggatatttggggcgttttgagcccttaggtggaaacgggaatatcttcgaataaaaactagacagaaatattctcagaatctcctttgtgatgtgggcattcaactaacacagttgaacatttcttttcacagagcagttttgaaacactcttttggtagaatctgcatgtggatatttggagcgcttggagggctattgtgccaatggaaatatctgcccctgaaaactagacagaagcaatcccagaaactactttgtgatgtttgcattcaactcacagagttgaacctacctcttcatagagcagtttggaaaacctctttttgtagaatctgcaagtggatatttggaccactttgaggccttcataggaaacagtactatcttcacataaaaactaggtagaagcattctcagaaacttctttgtgatgtgtgaattcaactcacagagttgaaccttcctttaatagagcagttttgaaacactctttttgtagaatctgcaagtagatatttggagagctttgaggccttcgttggaaactggaatatcttcacataaaaagtagatagaggcattctcagaaatttttctgtgatatgtagattcaactcacagcgttgaacctttcttttgatagagcagttttgaaaaactcttttatcgaatctgcaagtagacatttggagtgctttgagggctgtggtcgaaaaggaaatatcttcacatggaaactagactgaagcattctcagcaacttctttgtgtcgtttgcattcatctcacagtgttgaacataccttttcatagagcagttttgaaacactcttcttgtagaatctgcaattggatatttggactgcgttgagacctccactggaaacgggaatatctccacataaacactagatagaagcattctctgaaacttctttgtgatgtgtgtattcaactcacagagttgaaccatcttttttatggagcggttttgaaacagtgttttttgtagaatcagcaattggatattgggagcgctttgaggcctctggtggaaagggaatgtcttcacataaaaactggacagaagcattctcagaaacatctttgtgatgtttgcattcaactcacagagttgatccttccttttaatagggcagttttgcaacactctttttgtagaatgcaccagtgggcttttggaacacgtcaagggctatggtgaaaaaggaaatatcttcacataaaaactagagagaaagtattgtgtaaaactcctttgtgatgtttgcattcaactcagaaagttgaacttctctttatatagtccagttttcaaacactatttttgtagaatctgcaagtggatactgggactgctttgaggccttcattggaaacgggattatcttcacataaaaactagactgaaggattcttagaaacttctttgtgatgtgtgcattcaactcaccgagtggaacctcacttttgatagagcagtgttgaaagacacttgttgtagaatctgcaggtggatatttggagtgctttgaagccttccttggaaacgggaatatcttcacataaaaactagacataagcattctctgaaacttctttgtgatgtgtctattcaactcacagagttgaaccttcctttttatggagcagttttgaaacactgtttttggagaatctgcaagtggatatttggagcgctttgaggcctatggtagaaaaagaaatatcttcatttaaatagtagacagaagcattctgagaaacttctttgtgatgtttgcattcaactaccagagttgaaccttccttttgatagagcagttttgaaacactctttgtgtagaatctgcatgtggatatctggagcgatttgaggcctatggtcaaaaaggaaatatcttcctatgaaaaacagacaaaagcattctcagaaactactttgagatatgtgcatttaactcacagagttgaaacttttttttgatagagcagttttgaaacactctgtaaaatctgaaagtggatatttggagctatttgagggctatggtggtaaagaaaatatattcccattaaactagacagaagcatcctcagaaacttctttatgatgtttgcattaaactcacagagttgaacatacctttccatagagcagttttgaaacactctttttggggaatccgcaagtggatatttggaccgctttgagacctttgctggaaatgggaatatcttcacatataaactagacagaagcattctcggaaacttcttcgtgatgtgtgcattctgctcccaaagttgaaccttcctcttcataaagcagttttgaaacactcttttgtacaatctaccattggatatgtggaaggctttgatgcccatggtagaaaaggatacatcctcatataaaatctagacagaaggattcacagaaactgctgtgtgatgtgtgcatccaaatcacggagttgaacttttcttttgttagagcagttttgaaaccctgtttccgtggaatctgccagtggacatttggagcgcattgagggctatggtggagaaggaaatatctccacataaaaactagaaagaagcattctcagaaacatctatgtgaagtgtgcattcaactcacagagttgaaccttccttttgatagaagagttttgaaacactcttttgtacaattgcaggtgaatatttggagcgctttgaagcctttgttggaaatgggaatatcctcacataaaaactagccagaagcattctcagaaacttctttgtgatgtgtgcattgaacccagagagatgaaccgttcctttgagagagcagttttgaaacgtgtttttgtaagatctgcaagtggatattaggggcgctttgagtccttaggtggaaacgggaatatcttcgaataaaaactagacagaattattctcagaaacttctttgtgatgtgggcattcaactaacacagttgaacatgtcttttgacagagcagttctgaaacactctttttgtagaatccgccagtggatatttggagcgctttgagggctattgtgcaaatgggaatatcttcacctaaaaactagaccgaagcaatcccagaaactactttgtgatgtttgcattcaactcacagagttgaacctacctcttcatagggcagtttggaaaacctctttttgtagaatctgcaagtggatatttggaccactttgaggccttcataggaaacagtactatcttcacataaaaactaggtagaagcattctcagaaacttctttgtgatgtgtgaattcaactcacagtgttgaaccttcctttaatagagcagttttgaaacactctttttgtagaatctgccagtagatatttggagcgctttgaggccttcgttggaaaccggaatatcttcacataaaaagtagatagaggcattctcagaaacttttttgtgatatgtagattcaactcacagcgctgaacctttcttttgatagagcagttttgaaaaactcttttatcgaatctgcaagtagacatttggagtgctttgagggctgtggtcgaaaaggaaatatcttcacatagaaactagactgaagcattctcagcaacttctttgtgacgtttgaattcatctcacagtgttgaacataccttttcatagagcagttttgaaacactatttttgtagaatctgcaattggatatttggacagcgttgaggccttcaatggaaacgggaatatcttcacataaaaactagacagaagcattctctgaaacttctttgtgatgtgtgtattcaactcacagagttgaaccatcttttttatggagcagttttgaaacagtgtttttgtagaatcagcaagtggatattgggagcgctttgaggcctctggtggaaagggaatgtcttcacataaaaactggacaaaagcattctcagaaacatctttgtgatgtttgcattcaactcacagagttgatccttccttttaatagggcagttttgcaacactctttttgtagaatgcaccagtgggcttttggagcacgtcaagggctatggtgaaaaaggaaatatcttcacataaaaactagacagaagtattctgtaaaactcctttgtgatgtttgcattcaactcagaaagttgaacttctctttatatagtccagttttcaaacactatttttgtagaatctgcaagtggatactgggactgctttgaggccttcgttggaaacgggtatcttcacataaaaactagactgaaggattcttagaaacttctttttgatgtgtgcattcaactcaccgagtggaacctcacttttgatagagcagtgttgaaagacacttgttgtagaatctgcaggtggatatttggagtgctttgaagccttccttggaaacgggaatatcttcacataaaaactagacataagcattctcagaaactcctttgtgatctgtccattcagctcacagagttgaaccttccttttgatagagcagttttgaaacactctttctgtagagtctgcaagtggatatcaggagcgctttgagacctatggcagaaaaagaaatatctggctctaaaaactagacagaagcattctgagaaacttctttgtgatgtttgcattcaactaccagagttgaaccttccttttgatagagcagttttgaaacattctttgtgtagaatctgcatgtggatatcaggagcgctttgaggcctatggcagaaaaagaaatatctggctctaaaaactagacagaagcattctcagaaactactttgagatatgtgcattcaactcacagagttgaaacttttttttgatagagcagttttgaaacactctgtagaatctgaaagtggatatttggagctttttgagggctatggtggaaatgaaaatatattcccattaaactagacagaaccatcctcagaaacttctttatgatgtttgcattaaactcacagagttgaacatacctttccatagagcagttttgaaacactctttttggggaatccgcaagtggatatttggaccgctttgagacctttgctggaaatgggaatatcttcacatataaactagacagaagcattctcggaaacttcttcgtgatgtgtgcattctgctcccaaagttgaaccttcctcttcataaagcagttttgaaacactcttttgtacaatctaccattggatatgtggaaggctttgatgcccatggtagaaaaggaaacatcctcatataaaatctagacagaaggattcacagaaactgctgtgtgatgtgtgcatccaaatcacggagttgaacttttcttttgttagagcagttttgaaaccccgtttccgtggaatctgccagtggacatttggagcgcattgagggctatggtggagaaagaaatatcttcacataaaaactagaaagaagcattctcagaaacacctatttgaagtgtgcattcaactcacagagttgaaccttacttttgacagaacagttttgaaactcacttttgtacaattgcaggtgaatatttggagcgccttgaagcctttgttggaagtgggaatatcttcacatacaaactagccagaagcactctcagaaacttctttgtgatgtgtgcattgaacccagagagatgaaccgttcctttgagagagcagttttgaaacgtgtttttgtaagatctgcaagtggatatttggggcgctttgagcccttaggtggaaacgggaatatcttcgaataaaaactagacagaattattctcagaatcttctttgtgatgtgggcattcaactaacacagttgaacatttcttttgacagagcagttctgaaacactctttttgtagaatccgccagtggatatttggagcgctttgagggctattgtgcaaacggaaatatcttcacctaaaaactagaccgaagcaatcccagaaactactttgtgatgtttgcattaaactcatagagttgaacctacctcttcatagagcagtttggaaaacctctttttgtagaatctgcaagtggatatttggaccactttgaggccttcataggaaacagtactatcttcacataaaaactaggtagaagcattgtcagaaagttctttgtgatgtgtgaattcaactcacagagttgaaccttcctttaatagagcagttttgaaacactctttttgtagaatctgcaagtagatatttggagcgctttgaggccttcgttggaaaccggaatatcttcacataaaaagtagatagaggcattctcagaaacttttttgtgatatgtagattcaactcacagcgctgaacctttcttttgatagagcagttttgaaaaactcttttatcgaatctgcaagtagacatttggagtgctttgagggctgtggtcgaaaaggaaatatcttcacatagaatctagactgaagcattctcagcaacttctttgtgacgtttgcattcatctcacagtgttgaacataccttttcatagagcagttttgaaacactctttttgtagaatctgcaattggatatttggactgcgttgaggccttcactggaaacgggaatatcttcacataaacactagacagaagcattctctgaaacttctttgtgatgtgtgtattcaactcacagagttgaaccatcttttttatggagcggttttgaaacagtgtttttgtagaatcagcaagtggatattgggagcgctttgaggcctctggtggaaagggaatgtcttcacataaaaactggacagaagcattctcagaaacatctttgtgatgtttgcattcaactcacagagttgatccttccttttaatagggcagttttgcaacactctttttgtagaatgcaccagtgggcttttggagcacgtcaagggctatggtgaaaaaggaaatatcttcacataaaaactagacagaagtattctctaaaactcctttgtgatgtttgcattcaactcagaaagttgaacttctctttatatagtccagttttcaaacactatttttgtagaatctgcaagtggatactgggactgctttgaggccttcgttggaaacaggattatcttctcataaaaactagactgaaggattcttagaaacttctttgtgatgtgtgcattcaactcaccgagtggaacctcacttttgatagagcagtgttgaaagacacttgttgtagaatctgcaggtggatatttggagtgctttgaagccttccttggaaacgggaatatcttcacataaaaactagacataagcattctcagaaactcctttgtgatctgtccattcagctcacagagttgaaccttccttttgatagagcagttttgaaacactctttctgtagagtctgcaagtggatatcaggagcgctttgaggcctaggcagaaaaagaaatatctgtatataaaaactagacagaagcattctgagaaacttctttgtgatgtttgcattcaactaccagagttgaaccttccttttgatagagcagttttgaaacactctttgtgtagaatctgcatgtggatatctggagcgatttgaggcctatggtcaaaaaggaaatatcttcctatgaaaaactgacaaaagcattctcagaaactactttgagatatgtgcattcaactcacagagttgaaacttttttttgatagagcagttttgaaacactctgtagaatctgaaagtggatatttggagctatttgagggctatggtggaaaagaaaatatattcccattaaactagacagaagcatcctcagaaacttctttatgatgtttgcattaaactcacagagttgaacatacctttccatagagcagttttgaaacactctttttggggaatccgcaagtggatatttggactgctttgagacctttgctggaaatgggaatatcttcacatataaactagacagaagcattctcaagaaacttcttcgtgatgtgtgcattctactcccaaagttgaaccttccttttcataaagcatttttgaaacactccttttgtacaatctacaattggatatttggaacgctttgatgcccgtggtagaaaaggaaatctcctcatataaaaactagacagaaggattcacagaaactgctgtgtgatgtgtgcatccaaatcacggagttgaacttttcttttgttagagcagttttgaaaccctgtttccgtggaatctgccagtgggcatttggagcgcattgagggctatggtggagaaggaaatatcttcacataaaaactagaaagaagcattctcagaaacatctatgtgaagtgtgcattcaactcacagagttgaaccttccttttgatagaagagttttgaaacactcttttgtacaattgcaggtgaatatttggagcgctttgaagcctttgttggaaatgggaatatcctcacataaaaactagccagaatcattctcagaaacttctttgtgatgtgtgcattgaacccagagagatgaaccgttcctttgagagagcagttttgaaacgtgtttttgtaagatctgcaagtggatatttggggcgctttgagtccttaggtggaaacgggaatatcttcgaataaaatctagacagaattattctcagaatcttctttgtgatgtgggcattcaactaacacagttgaacatttcttttgacagagcagttctgaaacactctttttgtagaatccgccagtggatatttggagcgcttggagggctattgtgcaaatggaaatatcttcacctaaaaactagaccgaagcaatcccagaaactactttgtgatgtttgcattcaactcacagagttgaacctacctcttcatagagcagtttggaaaacctctttttgtagaatctgcaagtggatatttggaccactttgaggccttcataggaaacagtactatcttaacataaaaactaggtagaagcattgtcagaaagttctttgtgatgtgtgaattcaactcacagagttgaaccttcctttaatagagcagttttgaaacactctttttgtagaatctgccagtagatatttggagcgttttgaggccttcattggaaaccggaatatcttcacataaaaagtagatagaggcattctcagaaacttttttgtgatatgtagattcaactcacagcgctgaacttttcttttgatagagcagttttgaaaaactcttttatcgaatctgcaagtagacatttggagtgctttgagggctgtggtcgaaaaggaaatatcttcacatagaaactagactgaagcattctcagcaacttctttgtgacgtttgcattcatctcacagtgttgaacataccttttcatagagcagttttgaaacactatttttgtagtatctgcaagtggatatttggactgctttgaggccttcattggaaacgggaatatcttcacataaacactagacagaagcattctctgaaacttctttgtgatgtgtgtattcaactcacagagtggaaccatcttttttatggagcggttttgaaacagtgttttggtagaatcagcaattggatatttggagcgctttgaggcctctggtggaaagggaatgtcttcacataaaaactggacagaagcattctcagaaacatctttgtgatgtttgcattcaactcacagagttgatccttccttttaatagggcagttttgcaacattctttttgtagaatgcaccagtgggcttttggagcacgtcaagggctatggtgaaaaaggaaatatcttcacaaaaaaccagacagaagtattctgtaaaactcctttgtgatgtttgcattcaactcagaaagttgaacttctctttatatagtccagttttcaaacactatttttgtagaatctgcaagtggatactgggactgctttgaggctatcgttggaaacaggattatcttcacataaaaactagactgaaggattcttagaaacttctttgtgatgtgtgcattcaactcaccgagtggaacctcacttttgatagagcagtgttgaaagacacttgttgtagaatctgcaggtggatatttggagtgctttgaagccttccttggaaacgggaatatcttcacataaaaactagacataagcatgctcagaaactcctttgtgatctgtccattcagctcacagagttgaaccttccttttgatagagcagttttgaaacactctttctgtagagtgtgcaagtggatatcaggagcgctttgaggcctatggcagaaaaagaaatatctggctctaaaaactagacagaagcattctgagaaacttctttgtgatgtttgcattcaactaccagagttgaaccttccttttgatagagcagttttgaaacactctttgtgtagaatctgcatgtggatatcaggagcgctttgaggcctatggcagaaaaagaaatatctggctctaaaatctagacagaagcattctcagaaactactttgtgttatgtgcattccactcacagagttgaaacttttttttgatagagcagttttgaaacactttgtagaatctgaaagtggatatttggagctctttgagggctatggtagaaaagaaaatatattcacattaaactagacagaagcattctcagaaacttctttatgatgtttgcattaaactcacagagttgaacatacctttccatagagcagttttgaaacactctttttgtggaatccgcaagtgaatatttggaccgctttgagaccttcgctggaaatgggaatattttcacatataaactggacagaagcattctcggaaacttcttcgtgatgtgtgcattctgctcccaaagttgaaccttccttttcataaagcagttttgaaacactcttttgtacaatctaccattggatatgtggaaggctttgatgcccatggtagaaaaggaaacatcctcatataaaatctagacagannnnnnnnnnnnnnnnnnnnnnnnnnnnnnnnnnnnnnnnnnnnnnnnnnnnnnnnnnnnnnnnnnnnnnnnnnnnnnnnnnnnnnnnnnnnnnnnnnnnagcactctcagaaacttctttaggatgtttacagtaaactcacagagttgaacatacctttccgtagagcagttttgaaacactctgtttgtgggatccgcaagtggatatttggaccgctttgagacctttgctggaaatgggaatatcttcacatataaactagacagaagcattctcagaaacttcttggtgatgggtgcattgtactccctaatttgaatcttccttctcatggagcagttttgaaacactctgtttgtgcaatctacaattggagaattggaacgcttggatgcccgtggtagaaaaggaaatatcctcatataaaaactagacagaaggattcacagaaaatgcttggggatgtgtgcattcaaatcacggagttgaatctttcttttgttagagcagttttgaaacactgtttctgtggaatctgccagcggacacttggagcgctttgagggctatggtggagaaggaaatatcttcacataaaaactagaaagaagcattctcagaaacatttatgtgaagcgtgcattcaactcacagagttgaaccttccttttgatagaacagttttgaaacactcttttgaacaattgcaggtgaatctttgagcgctttgaagcctttgttggaaatgggaatatcttcacacacaaactagccagaagcattctcagaaacttctttgtgatgtgtgcgttgaacccagagagatgaacctttccttcgatagagcagttttgaaacgcgtttttgtaagatcggcaagcggataattggcttcgctttttgtcctttggtggaaacgggaatatcttctaataaaaactagacagaaatattctcagaatcttctttgtgatgtgggcattcaactaacacagttgaacctttcttttcacagagcagttttgaaacacccttttggtagaatctgccagtggatatttggagcgctttgagggctattgtgccaatggaaatatctgcccctaaaaactagacagaaagcattctcagaaactgctttgtgatgtttgcattcaactcacagagttgaacctaccttttcatagagcagttttgaaaacctctttttgtagaatctgcaagaggatattcggaccactttgaggccttcataggaaacagtaatatcttcacataaaaactagatagaagcattgtcaggaagttctttgtgatgtgtgaattcaactcacagagttgaaccttcctttaatagagcagtgttgaaacactctttttctagaatctgcaagtagatatttggagcgcttggaggccttcgttggaaaccggaatatcttcacaggaaatgtagatagagtcattctcagaaacttttttgtgatatgtagattcaactcacagcgttgaacctttcttttgatagagcagttttgaaaaactcttttatcgagtctgcaagtagacatttggagtgctttgagggctgtggtcgaaaaggaaatatcttcacatagaaactagactgaagcattctcagcaacttctttgtgacgtttgcattcatctcacagtgttgaacatacctttccgtagagtagttttgaaacactgtttttgtagaatcggcaagtggatatttggactgctttgaggccttcatcggaaacgggaatatcttcacataaacactagagagaagcattctgagaaacttctttgtgatctatccattcaactcacagagttgaaccttcctttttatggagcagttttgaatcactgtttttggagtatctgcaagtggatatttggagcgctttgaggcctatggtagaaaaagaaatatctgcctctaaaaaccagacagaagcattccgagaaacttctctgtgatgtttgcattcaactagcagagttgaaccttcctcttgatagggcagtttggaaacactctttttgtagaatctgcatgtggatatctggagtggtttgaggcctacggtcaaaaatgtaatctcttcctgggaaaaatagacgaaagcattctcagaaactgctttgtgatatgtgcattcgactcaccgagttgaaacttttttttgatagagcagttttgaaacactctgtagaatctgaaagtgtatatttggaactatttgagggctatggcgaaaaagaaaatatattcacattaaactagacagcagcattcccagaaacttctttaggatgttttcagtaaactcacagagttgaacatacctttccgtagagcagttttgaaacactctgtttgtgggatccgcaagtggatatttggacccctttgagacctttgctggaaacgggaatatcttcacatataaactagacagaagcattctcagaaacttcttcgtgatgtgtgcattctactcccgaatttgaatcttccttttcatgaagcagttttgaaacacactgtttgtgcaatccacaattggataattggaacgctttgatgcccatggtagaaaaggaaatatcctcatataaaaactagacagaaggattcacagaaaatgctttgtgatgtgtgcattcaaatcacggagttgaatctttcttttgtcagagcagttttgaaacactgtttctgtggaatctgccagcggacacttgcagcgctttgagggctatggtggagaaggaaatatcttcccataaaaactagaaagaagcattctcagaaacatttatgtgaagcgtgcattcaactcacagagttgaaccttccttttgatacaacagttttgaaacactcttttgaacaattgcaggtgaatctttggagcgctttgaagcctttgttggaaatgggaatatcttcacacataaactagccagaagtattctcagaaacttctttgtgatgtgtgcgttgaacccagagagatgaacctttcctttgatagagcagttttgaaacgtgtttttgtaagatctgcaagcggataattggcttcgctttgtgtcctttggtggaaacgggaatatcttctaataaaaactagacagaaaaatattctcacaatcgtctttgtgatgtgggcattcaactaacacagttgaacatttcttctcacagagcagttttgaaacactcttttgctagaatctgccagtggatacttggagggctttgagggctattgtgccaatggagatatcttcccctaaaaactagacagaagcattctcagaaactacttcgtgatgtttgcattcaacacacagagttgaacatacctcttcacagagcagttttgaaaacctctttctgtagaatctgcaagtggatattcggaccactttgaggccttcacaggaaacagtaatatcttcacataaaaactagatagaaacattgtcagaatgttctttgtgatgtgtgaattcaactcacagagttgaaccttcctttaatagagcagttttgaaacactctttttctagaatctgccagtagatatttggagcgctttgaggccttcgttggaaaccggaatatctccacataaaaagtagatagaggcattctcagaaacttttctgtgaaatgtagattcaactcacagcgttgaacctttctttggatggagcagttttgaaaaacccttttatcgaatctgcaggtagacattcggggtgctttgagggctgtggtgcaaaaggaaatgtcttcccatagaaactagactgaagcattctcagcaacttcttggtaacgtttgcattcatctcacagtgttgaacatacctttccatagagtggttttgaaacactgtttttgtagaatcggcaagtggatatttggactgctttgaggccttcatcggaaacgggaatatcttcacataaacactagagagaagcattcccagaaacttctttaggatatttgcagtaaactcacagagttgaacatacctttttatggagcagttttgaaacactgtttttggagaatctgcaagtggatatttggagcgctttgaggcctatggtagaaaaagaaatatctgcctatgacaacaagacagaagcattctgagaaacttctttgtgatgtttgcattcaactaccagagttgaatcttccttttgatagggcagtttggaaacactctttttgtagaatctgcatgtggatatctggagcgatttgaggcctatggtcaaaatggaaatatcttcctgggaaaaatagacgaaagcattctcagaaactgctttgtgatatgtgcattcgactcaccgagttgaaactttttttggatagagcagttttgaaacactctgtagaatctgaaagtggatgtttggagctctttgagggctatggcggaaaagaaaatatattcacattaaactagacagcagcattctcagaaacttctttaggatgtctgcagtaaactcacagagttgaacatacctttctgtagagcagttttgaaacactctgtttgtgggatccgcaagtggatatttggacagctttgagatctttgctggaaatgggaatatcttcacatataaactagacagaagcattctcagaaacttcttcgtgatgtgtgcattctactcccgaatttgaatcttccttttcatgaagcagttttgaaacactctgtttgtgcaatccacagttggataattggaacgctttgatgcccatggtagaaaaggaaatatcctcatataaaaactagacagaagcattcacagaaaatgctttgtgatgtgtgcattcaaatcacggagttgaatgtttcttttgttagagcagttttgaatcactgtttctgtggaatctgccagcggacacttggagcgctttgagggctatggtggagaaggaaatatcttcacataaaaactagaaagaagcattctaggaaacatttatgtgaagcgtgcattcaactcacagagttgaaccttccttttgatagaacagttttgaaacactcttttgaacaattgcaggtgaatctttggagcgctttgaagcctttgttggaaatgggaatatcttcacacacaaactagccagaagtattctcagaaacttctttgtgatgtgtgcgttgaacccagagagatgaacctttcctttgatagagctgttttgaaacgtgtttttgtaagatctgcaagcggataattggcttcgctttgtgtcctttggtggaaacgggaatatcttctaataaaaactagacagagatattctcagaaacttctttgtgatgtgggcattcaactaacgcagttgaacatttcttttcacagagcagttttgaaacactcttttggtcgaatctgccagtggatatttggagcgctttgagggctattgtgccaatggaaatatctgcccctaaaaactagacagaagcattctcagaaactacttcgtgatgtctgcattcaacacacagagttgaacatacctcttcacagagcagttttgaaaacctctttctgtagaatctgcaagtggatattcgggccactttgaggccttcataggaaacagtaatatcttcacataaaaactagatagaagcattgtcagaaagttctttgtgatgtgtgaattcaactcacagagttgaaccttcctttaatagagcagttttgaaacactcttcttctagaatctgcaagtagatatttggagcgctttgaggccttcgttggaaaccggaatatcttcacataaaaagtagatagaggcattctcagaaacttttttttgatatgtagattcaactcacagcgttgaacctttctttggatggagcagttttgaaaaactcttttttcgaatctgcaggtagacatttggggtgctttgagggctgtggtgcaaaaggaaatgtcttcccatagaaactagactgaagcattctcagcaacttctttgtgacgtttgcattcatctcacagtgttgaacatacctttccatagagtagttttgaaacactatttttgtagaatctgcaagtggatatttggactgctttgaggccttcatcggaaacggcaatatcttcacataaacactagacagaagcattctcagaaacttctttgtgatctgtccattcaactcacagagttgaaacttcctttttatggagcagttttgaaacactgtttttggagaatctgcaagtggatatttggagagatttgaggcctatggtagaaaaaggaatatctacctctaaaaactagacagaagcattccgagaaacttctctgtgatgtttgcattcaactagcagagttgaaccttccttttgatagggcagtttggaaacactctttttgtagaatctgcatgtggatatctggagcggtttgaggcctacggtcaaaaaggcaataagttcctgggaaaaatagacgaaagcattctcagaaactgctttgtgatatgtgcattcgaatcaccgagttgaaacttttttttcatagagcagttttgaaacactctgtagattctgaaagtggctatttggaggtctttgagggctatggcggaaaagaaaatatattcacattaaactagacagcagcattctcagaaacttctttaggatgtttgcagtaaactcacagagttgaacatacctttccgtagagcagttttgaaacactctgtttgtgggatccgcaagtggatatttggaccgctttgagaacttggctggaaatggcaatatcttcacgtataaactagacagaagcattctcagaaacttcttcgtgatgtgtgcattctactcccaaatttgaatcttccttttcatgaagcagttttgaaacactctatttgtgcattctacaattggatgattggaacgctttgatgtccatggtagaaaaggaaatatcctcatataaaaactagacagaaggattcacagaaaatgctttgtgatgtgtgcattccattcacggagttgaatctttcttttgttagagcagttttgaaacactgtttctgtggaatctgccagcggacacttggagcgctttgagggctatggtggagaaggaaatatcttcccataaaaactagagagaagcattctcagaaccatttatgtgaagcgtgcattcaactcacagagttgaaccttccttttgatagaacagttttgaaacactcttttgaacaattgcaggtgaatatttggagggctttgaagcctttgttggaaatgggtatatcttcacacacaaactagccagaagcattctcagaaacttctttgtgatgtgtgcgttgaacccagagagacgaacctttcctttgatagagcagttttggaatgtgtttttgtaagatctgcaagcggataattggcttcgctttgtgtcctttggtggaaacgggaatatcttctaataaaaactagacagaaatattctcacaatcgtctttgtgatgtgggcattcaactaacacagttgaacatttcttctcacagagcagttttgaaacactcttttgctaggatctgccagtggatacttggagcgctttgagggctattgtgccaatggagatatcttcccctaaaaactagacagaagcattctcagaaactactttgtgatgtttgcattcaactcacagagttgaacatacctcttcatagagcagttttgaaaacctctttttgtagaatctgcaagtggatattcggaccactttgaggccttcataggaaacagtaataccttcacataaaaattagatagaagcattgtcagaaagttctttgtcatgtgtgaattcaactcacagagttgaaccttcctttaatagaccagttttgaaacactctttttctagaatctgcaagtagatatttggagtgctttgaggccttcgttggaaaccggaatatcttcacataaaacgtagatagaggcattctcagaaacttttttgtgatatgtagattcaactaacagcgttgaacttttcttttgatacagcggttttgaaaaactcttatatcgaatctgcaaatagatatttggagtgctttgagagctgtggtgcaaaaggaaatgtcttcccatagaaactagactgaagcattctcagcagcttctttgtgacgtttgcattcatctcacagtgttgaacatacctttccatagagtagttttgaagcactatttttgtagaatctgcaagtggatatttggactgctttcaggccttcatcggaaacgggaatatcttcacataaacactagacagaagcattctcagaaacttctttgtcatctgtccattcaactcacagagttgaaccttcctttttatggagcagttttgaaacactccttttggagaatctgcaagaggatatttggagcgctttgaggcctatggtagaaaaagaaatatctgcctctaaaaaccagacagaagcattctgagaaacttctttgtgatgtttgcattcaactaccagagttgaaccttccttttgatagggcagtttggaaacactctttttgtagaatctgcatgtggatatctggagcgatttgaggcctacggtccaaaaggaaatatcttcctgggaaaaatagatgaaagcattctcagaaactgctttgtgatatgtgcattcgactcaccgagttgaaactttttttggatagagcagttttgaaacactctgtagaatctgaaagtggatatttggaactctttgagggctatggcggaaaagaaaatatattcacattaaactagacagcagcattcccagaaacttctttaggatgtttgcagtaaactcacagatttgaacatacctttccgtagagcagttttgaaacactctgtttgtgggatccgcaagtggatatttggaccgctttgagacctttgctggaaacgggaatatcttcacatgtaaactggacagaagcattttcagaaacttcttcgtgatgtgtgcattctattcccaaatttgaatcttccttttcatgaagcagttttgaaacactctgtttgtgcaatccacaattggataattggaaagctttgatgcccatggtagaaaaggaaatatcctcatataaaaactagacagaaggattcacagaaaatgctttgtgatgtgtgcattcaaatcacggagttgaatctttcttttgtcagagcagttttgaaacactgttactgtggaatcttccagcggacacttggagcgctttgagggctatggtggagaaggaaatatcttcacataaaaactagaaagaagcattctcagaaccatttatgtgaagcgtgcattcaactcacagagttgaaccttccttttgatagaacagttttgaaacactcttttgaacaattgcaggtgaatatttggagggctttgaagcctttgttggaaatgggaatatcttcacacacgaactagccagaagcattctcagaaacttctttgtgatgtgtgcgttgaacccagagagatgaacttttcctttgatagagcagttttgaaacgtgtttttgtaagatcggcaagtggataattggcttcgctttgtgtcctttggtggaaacgggaatatcttctaataaaaactagacagaaatattctcagaatctcctttgtgatgtgggcattcaactaacacagttgaacatttcttttcacagagcagtttggaacactcttttggtagaatctgccagtggatatttggagcgcttggagggctattgtgccaatggaaatatctgcccctgaaaactagacagaagcattctcagaaactacttcgtgatgtttgcattcaacacacagagttgaacatacctcttcacagagcagttttgaaaacctctttctgtagaatatgcaagtggatattcggaccactttgaggccttcattggaaacagtaatatcttcacataaaaactagatagaaacattgtcagaaagttctttgtgatgtgtgaattcaactcacagagttgaatcttcctttaatagagcagttttgaaacactctttttctagaatctgccagtagatatttggagcgctttgaggccttcgttggaaaccggaatatcttcacataaaaagtagatagaggcatctcagaaacttttttgtgatatgtagattcaactcacagcgttgaacctttctttggatggagcagttttgaaaaactcttttatcgaatctgcaggtagacatttggggtgctttgagggctgtggtgcaaaaggaaatgtcttcccatagaaactagactgaagcattctcagcaacttctttgtgacgtttgcattgatctcacagtgttgaacatacctttgcatagagtagttttgaaacactatttttgtagaatctgcaagtggatatttggactgctttgaggcctccatcggaaacgggaatatcttcacataaacactggacagaagcattctcagaaacttctttgtgatctgtccattcaactcacagagttgaaccttcctttttatggagcagttttgaaacactgttcttggagaatctgcaagtggatatttggagcgctttgaggcctgtggtagaaaaagaaatatctgcctctaaaaactagacagaagcattctgagaaacttctttgtgatgtttgccttcaactaccagagttgaaccttccttttgatagggcagtttggaaacactctttttgtagaatctgcatgtggatatctggagcgaattgaggcctaccgtccaaaaggaaatatcttcctgggaaaaatagacgaaagcattctcagaaagtgctttgtgatatgtgcattcgactcaccgagttgaaacctttttttgatagagcagttttgaaacactctgtagaatctgaaagtggatatttggagctctttgagggctatggcggaaatgaaaatatattcacattaaagtagacagcagcattcccagtaaacttctttaggatgtttgcagtaaactcacagagttgaacatacctttccgtagagcagctttgaaacactctgtgtgtgggatccgcaagtggatatttggaccgctttgagacctttgctggaaacgggaatatcttcacatataaactggacagaagcattctcagaaacttcttcgtgatgtgtgcattctcctcccgaatttgaatcttccttttcatgaagcagttttgaaacactctgtttgtgcaatccacaattggataatgggaacgctttgatgcccatggtagaaaaggaaatatcctcatataaaaactagacagaaggattcacagaaaatgctttgtgatgtgtacattcaaatcacagagttgaatctttcttttgtcagagcagttttgaaacactgtttctgtggaatctgccagcggacacttggagcgctttgagggctatggtggagaaggaaatatcttcccataaaaactagagagaagcattctgagaaccatttatgtgaagcgtgcgttcctctcacagagttgaaccttccttttgatagaacagttttgaaacactcttttgaacaattgcaggtgaatatttggagggctttgaagcctttgttggaaatgggaatatcttcacacacaaactagccagaagcattctcaagaaacttctttgtgatgtgtgcgttgaacccagagagatgaacctttccttggatagagcagttttgaaacgtgtttttgtaagatctgcaagtggataattggcttcgctttgtgtcctttggtggaaacgggaatatcttctaataaaaactagacagaaatattctcagaatcttctttgtgatgagggcattcaactaacacatttgaacatttcttttcacagagcagttttgaaacactcttttggtggaatctgccagaggatatctggagcgctttgagggctattgtgccaatggaaatatcttcccctaaaaactagacagaaacattctcagaaactactttgtgatgtttgcattcaactcacagagttgaacatacctcttcatagagcagttttgaaaacctctttttgtagaatctgcaagtggatattcggaccactttgaggccttcataggaaacagtaatatcttcacataaaaactagatagaagcattgtcaggaagttctttgtgatgtgtgaattcaactcacagagttgaaccttcctttaatagagcagttttgaaacactctttttctagaatctgcaagtagatatttggagcgcttggaggccttctttggaaaccataatatcttcacaggaaatgtagatagaggcattctcagaaacttatttgtgatatgtagattcaactcacagcgttgaacctttctttggatggagcagttttgaaaaactcttttatcgaatctgcaggtagacattcggggtgctttgagggctgtggtgcaaaaggaaatgtcttcccatagaaactagactgaagcattctcagaaacttcttggtgacgtttgcattcatctcacagtgttgaacatacctttccatagagtagttttgaaacactgtttttgtagaatcggcaagtggatatttggactgcattgaggccttcatcggaaacgggaatatcttcacataaacactagagagaagcattctcagaaacttctttgtgatctgtccattcaactcacagagttgaaccttcctttttatggagcagttttgaaacactgtttttggagaatctgcaagtggatatttggagcgcttttaggcctatggtagaaaaagaaatatctgcctattacaactagactgaagcattccgagaaacttctttgtgatgtttgcattcaactagcagagttgaaccttccttttgatagggcagcttggaaacactctttttgtagaacccgcatgtggatatctggagcggtttgaggcctacggtcaaaaaggaaatatcttcctgggaaaaatagacgaaagcattctcagaaactgctttgtgatatgtgcattcgactcaccgagttgaaacatttttttgatagagcagttttgaaacactctgtagaatctgaaagtggatatttggagctctttgagggctatggcggaaaagaaaatatattcacattaaactagacagcaacattctcagaaacttccttaggatgtttgcagtaaactcacagagttgaacatacctttccgtagagcagttttgaaacactctgtttgtgggatccgcaagtggatatttggaccgctttgagacctttgctggaaatgggaatatcttcacatataaactagacagaagcattctcagaaacttcctcgtgatgtgtgcattctactcccgaatttgaatcttccttttcctgaagcagttttgaaacactctgtttgtgcgatccacaattggataattggaacgctttgatgcccatggtagaaaaggaaatatcctcatatgaaaactagacagaaggattcacagaaaatgctttgtgatgtgtgcattcaaatcacggagttgaatctttcttttctcagagcagttttgaaacactgtttctgtggaatctgccagcggacacttggagcgctttgagggctatggtggagaaggaaatatcttcccataaaaactagaaagaagcattctcagaaacatttatgtgaagcgtgcattcaactcacagagttgaaccttccttttgatacaacagttttgaaacacccttttgaacaattgcaggtgaatctttggagcgctttgaagcctttgttggaaatgggaatatcttcacacacaaactagccagaagcattctcagaaacttctttgtgatgtgtgcgttgaacccagagagatgaacctttcctttgatagagctgttttgaaacgtgtttttgtaaggtctgcaagcggataatgggcttcgctttgtgtcctttggtggaaacgggaatatcttctaataaaaactagacagaaatattctcacaatcgtctttgtgatgtgggcattcaactaacacagttgaacatttcttctcacagagcagttttgaaacactcttttgctagaatctgccagtggatacttggagcgctttgagggctattgtgccaatggagatatcttcccctaaaaactagacagaagcattctcagaaactactttgtgatgtttgcattcaactcacagagttgaacatacctcttcatagagcagttttgaaaacctctttttgtagaatctgcaagtggatattcggaccactttgaggccttcataggaaacagtaataccttcacatgaaaactagatagaagcattgtcagaaagttcgttgtgatgtgtgaatttaactcacagagttgaagcttcctttaatagagcagttttgaaacactctttttctagaatctgcaagtagatatttggagcgctttgaggccttcgttggaaaccggaatatcttcacataaaaagtagatagaggcattctcagaaacttttttgtgatatgtagattcaactcacagcgttgaacctttctttggatggagcagttttgaaaaactcttctatcgaatctgcaggtagacatttggggtgctttgagggctgtggtgcaaaaggaaatgtcttcccatagaaactagacagaagcattctcagcaacttctttgtgacgtttgcattcatctcacagtgttgaacttacctttccatagagtagttttgaagcactatttttgtagaatctgcaagtggatatttggactgctttgaggccttcatcggaaacgggaatatcttcacataaacactagacagaagcattctcagaaacttctttgtcatctgtccattcaactcacagagttgaaccttcctttttatggagcagttttgaaacactgttcttggagaatctgcaagtggatatttggagcgcttagaggcctgtggtagaaaaagaaatatctgcctctaaaaactagacagaagcattctgagaaacttctttgtgatgtttgcattcaactagcagagttgaaccttccttttgatagggcagtttggaaacactcttttgtagaatctgcatgtggatatctggagcgatttgaggcctacggtcaaaaaggaaatatcttcctgggaaaaatagacgaaagcattctcagaaactgctttgtgatatgtgcattcgactcaccgagttgaaactttttttggatagagcagttttgaaacactctgtagaatctgaaagtggatatttggagctctttgagggctatggtggaaaagaaaatatattcacattaaactatacagcagcattctcagaaacatctttaggatgtttgcagtaaactcatagagttcaacatacctttccgtagagcagctttgaaacactctgtttgtgggatccgcaagtggatatttggaccgctttgagacctttgctggaaatgggaatatcttcacatataaactagacaggaagcattctcagaaacttcttcgtgatgtgtgcattctactcccgaatttgaatcttccttttcatgaagcagttttgaaacactctgtttgtgcaatccacaattggataattggaacgctttgatgcccatggtagaaaaggaaatagcctcatataaaaactagacagaaggattcacagaaaatgctttgtgatgtgtgcattcaaatcacggtgttgaatctttcttttgttagagcagttttgaaacactgtttctgtggaatctgccagcggacacttggagcgctttgagggctacggtggagaaggaaatatcttcacataaaaactagaaagaagcattctcagaaacatttatgtgaagcgtgcattcaactcacagagttgaaccttccttttgatagaacagttttgaaacactcttttgaacattgcaggtgaatctttggagcgctttgaagcctttgttggaaatgggaatatcttcacacacaaactagccagaagcattctcagaaacttctttgtgatgtgtgcgttgaacccagagagatgaacctttccttcgatagagcagttttgaaacgcgtttttgtaagatcggcaagcggataattggcttcgctttgtgtcctttggtggaaacgggaatatcttctaataaaaactagacagaaatattctcagaatcttctttgtgatgtgggcattcaactaacacagttgaacgtttcttttcacagagcagttttgaaacactcttttggtagaatctgccagtggatatttggagcgctttgagggctcttgtgccaacggaaatatctgcccctaaaaactagacagaagcattctcagaaactactttgtgatgtttgcattcaactcacatagttgaacatacctcttcatagagcaggtttgaaaacttctttttgtattatctgcaagtggatatttggaccactttgaggccttcataggaaacagtaatatattctcataaaaactcgatagaagcattgtcagaaagttctttgtgatgtgtgaattcaactcacagagttgaaccttcctttcatagagcagttttgaaacactctttttctagaatctgcaagtagatatttggagcgctttgaggccttcgttggaaaccggactatcttcacgtaaaaagtagatagaggcattctcagaaactttttttgtgatatgtagattcaactcacagcgttgaacctttctttggatggagcagttttgaaaaactcttttatcgaatctgcaggtagacatttggggtgctttgagggctgtggtgcaaaaggaaatgtcttcccatagaaactagactgaagcattctcagcaacttcttggtgacgtttgcattcatctcacagtgttgaacatacctttccatagagtagttttgaaacactgtttgtgtagaataggcaagtggatatttggactgctttgaggccttcatcggaaacgggaatatcttcacataaacactagagagaagcattctcagaaacttctttgtgatctgtccgttcaactcacagagttgaaccttcctttttatggagcagttttgaaacactgcttgtggagaatctgcaagtggatatttggagcgccttgaggccaatggtagaaaaagaaatatctgcctctaaatactagactgaagcattccgagaaacttttttgtgatgtttgcattcaactagcagagttgaaccttccttttgtagggcagtttggaaatactcattttgtagaatctgcatgtggatatctggagcggtttgaggcctacggtcaaaaaggaaatatcttcctgggaaaaatagacgaaagcattctcagaaactgctttgtgatatgtgcattcgactcaccgagttgaaacttttttttgatagagcagttttgaaacactctgtagaatctgaaagtagatatttggagctctttgatggctatggcggaaattaaaatatattcacattaaagtagacagcagcattctcagaaacttctttaggatgtttgcagtaaactcacagagttaaacatatctttccgtagagcagttttgaaacactctgtttgtgggatccgcaagtggatatttgggcccctttgagacctttgctggaaatgggaatatcttcacatataaactagacagaagcattctcagaaacttcttcgtgatgtgtgcattctactcccaaatttgaatcttctttctcatgaagcagttttgaaacactctatttgtgcaatctacaattggataattggaaccctttgatgcccatggtagaaaaggaaatatcctcatataaaaactagacagaaggattcacagaaaatgctttgtgatgtgtgcattcaaatcacggagttgaatctttcttttgttagagcagttttgaaacactgtttctgtggaatctcccaggggacacttggagcgctttgagggctacggtggagaaggaaatatcttctcataaaaactagaaagaagcattctcagaaacatttatgtgaagcgtgcattcaactcacagagttgaaacttccttttgatagaacagttttgaaacactcttttgaacaattgcaggtgaatctttggagcgctttgaagcctttgttggaaatgggaatatcttcacacacaaactagccagaagcattctaagaaacttctttgtgatgtgtgcgatgaacccagagagatgaacctttcctttgatagagcagttttgaaaagtgtttttgtaagatctgcaagcggataattggcttccctttgtgtcctctggtggaaatgtgaatatcttctaataaaaactagacagaaatattctcagaatcttctttgtgatgtgggcattcaacaaacacagttgaacgtttcttttcacagagcagttttgaaacactcttttggtagaatctgccagtggatatttggagcgctttgagggctattgtgccaacggaaatatctgcccctaaaaagtagacagaagcattctcagaaactgctttgtgatgtttgcattcaactcacagagttgaacataccttttcatagagcagttttgaaaacctctttttgtagaatctgcaagtggatattcggaccagtttgaggccttcataggaaacagtaatatcttcacataaaaactagatagaagcattgtcagaaagttctttgtgatgtgtgaattcaactcagagagttgaaccttcctttaatagagcagttttgaaacactctttttctagaatctgccagtagatatttggagcgctttgaggccttcgttggaaaccggaatatcttcacataaaaagtagatagaggcattctcagaaactttttcgtgatatgtagattcaactcacagcgttgaacctttcttttgatagagcagttttgtaaaactcttttatcgaatctgcaagtagacatttgagtgctttgagggctgttgtgcaaaaggaaatgtcttcccatagaaactggactgaatcattctcagcaacttcttggtgacgtttgcattcatctcacagtgttgaacatacctttgcatagattagttttgaaacactgtttttgtagaatctgcaagtggacatttggactgctttgaggccttcattggaaacgggaatatcttcacataaacactagacagaagcattctcagaaacttctttgtcatctgtccattcaactcacagagttgaaccttcctttttatggagcagttttgaaacactccttttggagaatctgcaagtggatatttggagcgctttgaggcctagggtagaaacagaaatatctgcctctaaaaaccagacagaagcattcagagaaacttctttgtgatgtttgcattcaactaccagagttgaaccttccttttgatagggcagtttggaaacactctttttgtagaatctgcatgtggatatctggagcgatttgaggcctacggtcaaaaaggaaatatcttcctgggaaaaatagacgaaagcattctcagaaactgctttgtgatatgtgcattcgactcaccgagttgaaactttttttttgatagagcagttttgaaaaactctatagattctgaaagtgcatatttggagctctttgagggctatggcggaaaagaaaatatattcacattaaactagacagcagcattctcagaaacttctttaggatgtttgcagtaaactcacagagttgaacatacctttccgtagagcagttttgaaacactctgtttgtgggatccgcaagtggatatttggaccgctttgggacctttgctggaaatgggaatatcttcacgtataaactagacagaagcattctcagaaacttcctcgtgatgtgtgcattctactcccgaatttgaatcttccttttcatgaagcagttttgaaacactctgtttgtgcaatccacaattggataattggaacgctttgatgcccatggtagaaaacgaaatatcctcatataaaaactagacagaaggattcacagaaaatgctttgtgatgtgtgcattcaaatcacggagttgaatctttcttttgtcagagcagttttgaaacactgtttctgtggaatctgccagcggacacttggagcgctttgagggatatggtggagaaggaaatatcttcccataaaaactagaaagaagcattctcagaaacatttatgtgaagcgtgcattcaactcacagagttgaaccttccttgtgatacaacagttttgaaacactcttttgaacaattgcaggtgaatctttggagcgctttgaagcctttgttggaaatgggaatatcttcacacacaaactagccagaagcattctcagaaacttctttgtgatgcgtgcgtggaacccagagagatgaacctttcctttgatagagcagttttgaaacgtgtttttgtaagatctgcaagtggataatcggcttcgctttgtgtcctttggtggaaacgggaatatcttctaataaaaactagacagaaatattctcagaatcttctttgtgatgagggcattcaactaacacatttgaacatttcttttcacagagcagttttgaaacactcttttggtggaatctgccagtggatatctggagcgctttgagggctattgtgccaatggaaatatcttcccctaaaaactagacagaagcattctcagaaactacttcgtgatgtttgcattcaacacacagagttgaacatacctcttcacagaacagttttgaaaacctctttctgtagaatctgcaagtggatattcggaccactttgaggccttcacaggaaacagtaatatcttcacataaaaactagacagaagcattgtcagaaagttctttgtgatgtgtgaattcaactcacagagttgaaccttcctttaatagagcagttgtgaaacactctttttctagaatctgcaagtagatatttggagcgctttgaggccttcgttggaaaccggaatatcttcacaggaaaagtagatagaggcattctcagaaactttttcgtgatatgtggattcaactcacagcgttgaacctttcttttgatagagcagttttgtaaaactcttttatcgaatctgcatgtagacatttggagtgctttgggggctgtggtgcaaaaggaaatgtcttcccatagaaactagactaaagcattctcagcaacttctttgtgacgtttgcattcatctcacagtgttgaacatacctttccatagagtagttttgaaacactgtttttgtagaatcggcaagtggatatttggactgctttgaggccttcatcggaatcgggaatatcttcacataaacactagagagaagcattctcagaaacttctttgttatctgtccattcaactcacagagttgaaccttcctttttatggagcagttttgaaacactgtttgtggagaatctgcaagtggatatttggagcgtcttgaggccaatggtagaaaaagaaatatctgcctctaaatactagactgaagcattccgagaaacttctctgtgatgtttgcattcaactagcagagttgaaccttccttttgatagggcagtttggaaacactctttttgtagaatctgcatgtggatatactggagcggtttgaggcctacggtcaaaaaggaaatatcttcctgggaaaaatagacgaaagcattctcagaaactgctttgtgatatgtgcattcgactctccgagttgaaacttttttttgatagagcagttttgaaacactctgtagaatctgaaagtgtatatttggagctcttcgagggctatggcggaaaagaaaatatattcacattaaactagacagcagcattctcagaaacttctttaggatgtttgcagtaaactcacagagttgaacctatctttccgtagagcagttttgaaacactctgtttgtgggatccgcaaggggatatttggaccgctttgagacctttgctggaaatgggaatatcttcacatataaactagacagaagcattctcagaaacttcttcgtgatgtgtgcattctacccccaaatttgaatcttccttttcatgaagcagttttgaaacactctatttgtgcaatctacaatgggataattggaacgctttgatgcccatggtagaaaaggaaatatcctcatataaaaactagacagaaaggattcacagaaaatgctttgtgatgtgtgcattcaaatcacggagttgaatctttcttttgttagagcagttttgaaacactgtttctgtggaatctgccagcggacacttggagcgctttgagggctatggtggagaaggaaatatcttcacataaaaactagaaagaagcattctcagaaacatttatgtgaagtgtgcattcaactcacagagttgaaccttccttttgatagaacagttttgaaacactcttttgaacaattgcaggtgaatctttggagcgctttaaagcctttgttggaaatgggaatatcttcacacacaaactagccagaagcattctcagaaacttctttgtgatgtgtgcgttgaacccagagagatgaacctttcctttgatagagcagttttgaaacgtgtttttgtaagatctgcaagcggataattggcttcgctttgtgtcctttgttggaaaccggaatatcttctaataaaaactagacagaaatattctcagaatcttctttgtgatgtgggcattcaactaacacagttgaacatttcttttcacagagcagttttgaaacactcttttggtggaatctgccagtggatatttggagcgctttgagggctattgtgccaacggaaatatcttcccctaaaaactagacagaagcattctcagaaactacttcgtgatgtttgcattcaacacacagagttgaacatacctcttcacagagcagttttgaaaacctctttctgtagaatctgcaagtggatattcggaccactttgaggccttcataggaaacagtaatatctttgcctaaaaactagatagaaagcattgtcagaaagttctttgtgatgtgtgaattcaactcacagagttgaaccttcctttaatagagcagttttgaaacactctttttctagaatctgctagtagatatttggagtgcttggaggccttctttggaaaccggaatatcttcacaggaaatgtagatagaggcattctcagaaactttttcgtgatatgtggattcaactcacagcgttgaacctttcttttgatagagcagtgtggtaaaactcttttatcgaatctgcaagtagacatttggagtgctttgggggctgtggtgcaaaaggaaatgtcttcccatagaaactagactgaagcattctcagcaacttcttggtgacgtttgcattcatctcacagtgttgaacatacctttccatagagtggttttgaaacactgtttttgtagaatcggcaagtggatatttggactgctttgaggccttcatcggaaacgggaatatcttcacataaacactagacagaagcattctcagaaacttctttgtggtctgtccattcaactcacagagttgaaccttcctttttatggagcagttttgaaacactgtttttggagaatctgcaagtggatatttggagccctttgaggcctatggtagaaaaagaaatatctgcctatgagaacaagacagaagcattctgagaaacttctttgtgatgtttgcattcaactaccagagttgaaccttccttttgatagggcagtttggaaacactctttttgtagagtctggatgtggatatctggagcgatttgaggcctacggtccaaaaggaaatatcttcctgggaaaaatagacgaaagcattctcagaaagggctttgtgatatgcgcattcgactcaccgagttgaaacttttttttgatagagcagttttgaaacactctgtagaatctgaaagtggatatttggagctctttgagggctatggcggaaaagaaaatatattcacattaaaaaagtagacagcggcattctcagaaacttctttaggatgtttgcagtaaactcacagagtggaacctacctttccgtagagcagttttgaaacactctgtttgtgggatccgcaagtggatatttggaccgctttgagacctttgctggaaatgggaatatcttcacatataaactagacagaagcattctcagaaacttcttcgtgatgtgtgcattctactcgcaaatttgaatcttccttctcatgaagcagttttgaaactctctatttgtgcaatctacaattggataattggaaccctttgatgcccatggtagaaaaggaaatatcctcatataaaaactagacagaaggattcacagaaaatgctttgtgatgtgtgcattcaaatcacggagttgaatctttcttttgtcagagcagttttgaaacactgtttctgtggaatctgccagcggacacttggagcactttgagggctatggtggagaaggaaatatcttcccataaaaactagagagaagtattctcagaaacatttatgtgaagcgtgcattcaactcacagagttgaaccttacttttgatacaacagttttgaaacactcttttgaacaattgcaggtgaatctttggagcgctttgaagcctttgttggaaatgggaatatcttcacacacaaactagccagaagcattctcagaaacttctttgtgatgtgtgcgttgaacccagagagatgaacctttcctttgatagagcagttttgaaacgtgtttttgtaagatcggcaagcggataattggtttcgctttgtgtcctttggtggaaacgggaatatcttctaataaaaactagacagaaatattctcacaatctcctttgtgatgtgggcattcaactaacacagttgaacatttcttttcacagagcagttttgaaacactcttttggtagaatctggcagtggatatttggagcgctttgagggctgttgtgccaatggaaatatctgcccctaaaatctagacagaagcattctcagaaactacttcgtgatgtttgcattcaactcacagagttgaacatacctcttcacagagcagtattgaaaacctctttttgtagaatctgcaagtggatattcggagcactttgaggccttcataggaaccagtaatatcttcgcataaaaactagatagaagcattgtcagaaagttctttgtgatgtgtgaattcaactcacagagttgaaccttcctttaatagagcagttttgaaacactctttttctagaatctgcaagtagatatttggagcgcttggaggccttcgttggaaaccggaatatcttcacaggaaatgtagatagaggcattctcagatactttttcgtgatatgtggattcaactcacagcgttgaacctttcttttgatagagcagttttgtaaaactcttttatcgaatctgcaagtagacatttggagtgctttgggggctgtggtgcaaaaggaaatgtcttcccatagaaactagactgaagcattctcagcaacttctttgtgacgtttgcattcatctcacagtgttgaacatacctttccatagagaagttttgaaacactaattttgtagaatctgcaagtggatatttggactgctttgaggccttcattggaaacgggaatatcttcacataaacactagacagaagcattctcagaaacttctttgtgatctgtccattcaactcacagagttgaaccttcctttttatggagcagttttgaatcactgtttttggagaatctgcaagtggatatttggagcgctttgaggcctatggtagaaaatgaaatatctgcctctaaaaaccagacagaagcattctgagaaacttctttgtgatgtttgcattcaactaccagtagttgaaccttccttttgatagggcagtttggaaacactctttttgtagaatctgcatgtggatatctggagcgatttgaggcctacggtcaaaaaggaaatatcttcctgggaaaaatagacgaaagcattctcagaaactgctttgtgatatgtgcattcgactcagcgagttgaaacttttttttgatagagcagttttgaaacactctgtagaatctgaaagtggatatttggagctctttgagggctatggcggaaaagaaattatattcacatgaaactagacagcagcattcccagaagcttctttaggatgtttgctgtaaactcacagagttgaacatacctttccgtagagcagctttgaaacactctgtgtgtgggatccgcaagtggatatttggaccgctttgagacctttgctggaaacgggaatatcttcacatataaactggacagaagcattctcagaaacttcttcgtgatgtgtgcattgtactcccaaatttgaatcttccttctcatgcagcagttttgaaacactctgtttgtgcaatctacaattggagaattggaacgcttggatgcccgtggtagaaaaggaaatatcctcatataaaaactagacagaaggattcacagaaaatgctttgtgatgtgtgcattcaaatcacggagttgaatctttctttcgtcagagcagttttgaaacactgtttctgtggaatctgccagcggacacttggagcgctttgagggctatggtggagaaggaaatatcttcccataaaaactagaaagaagcattctcagaaacatttatgtgaagcgtgcattcaactcacagagttgaaccttccttttgatacaacagttttgaaacactcttttgaacaattgcaggtgaatccttggagcgctttgaagcctttgttggaaatgggaatatcttcacacacaaactagccagaagcattctcagaaacttctttgtgatgtgtgcgttgaacccagagagatgaacttttcctttgatagagcagttttgaaacgtgtttttgtaagatcggcaagtggataattggcttcgctttgtgtcctttgttggaaacgggaatatcttctaataaaaactagacagaaatattctcagaatctcctttttgatgtgggcattcaactaacacagttgaacatttcttttcacagagcagttttgaaacactcttttggtagaatctgccagtggatatttggagcgcttggagggctattgtgccaatggaaatatctgcccctgaaaactagacagaagcattctcagaaactactttgtgatgtttgcattcaactcacagagatgaacatacctctttatagagcagttttgaaatcctctttctgtagaatctgcaagtggatattcggaccactttgaggccttcatagaaaacagtaatatcttcacataaaaactagattcaagcattctcggaaacttctttgtgatgtgtgaattcacctcacagagttgaaccttcgataaatagagcagttttgaaacactctttttgtagaatctgcaatagatatttggagcgctttgaggccttcgttggaaaacggaatgtcttcacataaaaagtagatagaagcattctcagaaactactttgtgatctctccattcaactcacagatttgaaccttccttttgatagagcggttttgaaaaactcttatatcgaatctgcaagtagatatttggagtgctttgagggctgtggtgcaaaaggaaatgtcttcccatagaaactagactgaagcattctcagcaacttctttgtgacgtttgcattcatctcacagtgttgaacataccttttcatagagcagttttgaaacactatttttgtagtatctgcaagtggatatttggactgctttgaggccttcattggaaacgggaatatcttcacataaacactagacagaagcattctcagaaacttctttgtgatctgtccattcaactcacagagttggaccttcctttttatggagcagttttgaatcactgtttttggagaatctgcaagtggatatttggagcgctttgaggcctatggtagaaaaagaaatatctgcctctaaaaaccagacagaagcattctgagaaacttctttgtgatgtttacattcaactaccagagttgaaccttccttttgatagggcagttcggaaacactctttttgtagaatctgcatgtggatatctggagcgatttgaggcctacggtccagaaggaaatatcttcctgggaaaaatggacgaaagcattctcagaaactgctttgtgatatgtgcatttgactcaccgagttgaaacttttttttgatagagcagttttgaaacactctgtagaatctgaaagtggatatttggagctctttgagggctatggcggcaaagaaactatattcacattaaagtagacagcagcattctcagaaacttctttaggatgtttgcagtaaactcacagagttgaacatacctttccgtagagcagttttgaaacactctgtttgtgggatccgcacgtggatatttggaccgctttgagacctttgctggaaatgggagtatcttcacgtataaactagacagaagcattctcagaaacttcttcgtgatgtgtgcattgtactcccaaatttgaatcttccttcccaaggagcagttttgaaacactctgtttgtgcaatctacaattggagaattggaacgcttggatgcccgtggtagaaaaggaaatatcctcatataaaaactagacagaagtattcacagaaaatgctttgtgatgtgtgcattcaaatcacggagttgaatctttcttttgttagagcagttttgaaacactgtttctgtggaatctgccagcggacacttggagcgctttgagggctacggtggagacggaaatatcttcacataaaaactagaaagaagcattctcagaaacatttatgtgaagcgtgcattcaactcacagagttgaaccttcctttggatacaacagttttgaaacactcttttgaacaattgcaggtgaatctttggagcgctttgaagcctttgttggaaatgggaatatcttcacacacaaactagccagaagcattctcagaaacttctttgtgatgtgtgcgttgaacccagagagatgaacctttcctttgatagagcagtttggaaacgtgtttttgtaagatctgcaagcggataattggcttcgctttgtgtcctttggtggaaacgggaatatcttctaataaaaactagacagaaatattctcagaatcttctttgtgatgtgggcattcaactaacagagttgaacgtttcttttcacagagcagttttgaaacactcttttggtagaatctgccagtggatatttggtgcgctttgagggctattgtgccaacggaaatatctgtccctaaaaactagacagaagcattctcagaaactgttcgtgatgtttgcattcaactcacagacttgaacatacctcttcatagagcagttttgaaaacctctttttgtagaatctgcaagtggatattcggaccactttgaggccttcataggaaacagtaatatcttcacataaaaactagatagaagcattgtcagaaagttctttgtgatgtgtgaattcaactcacagagttgaaccttcctttaatagagcagttttgaaacactcttcttctagaatctgcacgtagatatttggagcgctttgaggccttcgttggaaaccggaatatcttcacagaaaaagtagatagaggcattctcagaaacattttttgtgatatgtagactcaactcacagcagttgaacctttctttggatggagcagttttaaaaaactcttttatcgaatctgcaggtagacatttggggtgctttgagggctgtggtgcaaaaggaaatgtcttcccatagaaactagactgaagcattctcagcaacttctttgtgacgtttgcattcatctcacagtgttgaacatacctttccatagggtagttttgaagcactatttttgtagaatctgcaagtggatatttggactgctttgaggccttcatcggaaacgggaatatcttcacataaacactagacagaagcattctcagaaatttctttgtggtctgtccattcaactcacagagttgaaccttcctttttatggagcagttttgaaacactgtttttggagaatctgcaagtggatatttggagcgctttgaggcctatggtagaaaaagaaatatctgcctatgacaacaagacagaagcattccgagaaacttctttgtgatgtttgcattcaactagcagagttgaaccttccttttgatagggcagtttggaaacactctttttgtagaatctgcatgtggatatctggagcggtttgaggcctacggtcaaaaaggtaatatcttcctgggaaaaatagacgaaagcattctcagaaactgctttgtgatatgggcattcgactcaccgagttgaaacttttttttgatagagcagttttgaaacactctgtagaatctgaaagtggatatttggagctctttgagggctatggcggaaaagaaaatatattcacattaaagtagacagcagcattctcagagacttctttaggatgtttgcagtaaactcacagagttgaacatacctttccgtaaagcagttttgaaaccttctgtttgtgggatctgcaagtggatatttggaccgctttgagacctttgctggaaatgggaatatcttcacatataaactagccagaagcattctcagaaacttcttcgtgatgtgtgcattctactcccaaagttgaaccttccttttcataaagcagttttgaaacactccttttgtacaatctacaattggataattggaacgctttgatgcccgtggaagaaaaggaaatctcctcatataaaaactagacagaaggattcacagaaaatgctttgtgatgtgtgcattcaaatcacggagttgaatctttcttttgtcagagcagttttgaaacactgtttctgtggaatctgccagcggacacttggagcactttgagggctatggtggagaaggaaatatcttcccataaaaactagaaagaagcattctcagaaccatttatgtgaagcgtgcattcaactcacagagttgaaccttccttttgatagaacagttttgaaacactcttttgaacaattgcaggtgaatctttggagcgctttgaagcctttgttggaaatgggaatatcttcacacacaaactagccagaagcattctcagaaacttctttgtgatgtgtgctttgaacccagagagatgaacctttcttttgatagagcagttttgaaacgtgtttttgtaagttcggcaagcggataattggcttcgctttgtttcctttggtggaaacgggaatatcttctaataaaaactagacagaaatattctcagaatctgctttgtgatgtgggcattcaactaacacagttgaacatttcttttcacagagcagttttgaaacactcttttggtagaatctgccagtggatatttggagcgcttggagggctattgtgccaatggaaatatctgcccctgaaaactagacagaagcattctcagaaactacttcgtgatgtttgcattcaactcaccgagttgaacatacctcttcatagagcagttttgaaaacctctttctgtagaatctgcaagtggatattcggaccactttgaggccttcataggaaacagtaatatcttcacataaaaactagatagaagcattgtcagaaagttctttgtgatgtgtgaattcaactcacagagttgaaccttcctttaatagagcagttgtgaaacactctttttctagaatctgcaagtagatatttggagcgcttggaggccttcgttggaaaccggaatatcttcacaggaaatgtagatagaggcattctcagatactttttcgtgatatgtggattcaactcacagctttgaacctttcttttgatagagcagttttgtaaaactcttttatcgaatctgcaagtagacatttggagtgctttgagggctgtggtgcaaaaggaaatgtcttcccatagaaactagactgaagcattctcagcaacttctttgtgacgtttgcattcatctcacagtgttgaacatacctttccatagagtagttttgaagcactatttttgtagaatctgcaagtggatatttggactgctttgaggccttcatcggaaacgggaataccttctcataaacactagacagaagcattctcagaaacttctttgtgatctgtccattcaactcacagagttgaaccttcctttttatggagcagttttgaaagactgtttgtggagaatctgcaagtggatatttggagcgccttgaggccaatggtagaaaaagaaatatctgcctctaaatactagactgaagcattccgagaaacttctttgtgatgtttgcattcaactagcagagttgaaccttccttttgatagggcagtttggaaacactctttgtgtagaatctgcatgtggatatctggagcggtttgaggcctacggtcaaaaaggaaatatcttcctgggaaaaatagacgaaagcattctcagaaactgctttgtgatatgggcattcgactcatcgagttgaaacttttgtttgatagagcagttttgaaacactctgtagaatctgaaagtggatatttggagatctttgagggctatggcggaaaacaaaatatattcacattaaagtagacagcagcattcttagaaacttctttaggatgtttgcagtaaactcacagagttgaacctacctttccgtagaggagttttgaaacactctgtttgtgggatccgcaagtggatatttggaccgctttgagacctttgctggaaatgggaatatcttcacatataaactagacagaagcattctcagaaacttctttgtgatgtgtgcgttgaacccagagagatgaacttttcctttgatagagcagttttgaaacgtgtttttgtaagatctgcaagcggataattggcttcgctttgtgtcctttggtggaaacgggtatatcttctaataaaaactagacagaaatattctcagaatctcctttgtgatgtgggcattcaactaacacagttgaacatttcttttaacagagcagttttgaaacactcttttggtagaatctgccagtggatatttggagcgcttggagggctattgtgccaatggaaatatctgcccctgaaaactagacagaagcattctcagaaactactttgtgatgtttgcattcaactcacagagttgaacatacctcttcatagagcagtcttgaaaacctctttttgtagaatctgcaagtggatattcggaccactttgaggccttcataggaaacagtaacatcttcacataaaaactagatagaaaacattgtcagaaagttctttgtgatgtgtgaattcaactcacagagttgaaccttcctttaatagagcagttttgaaacactctttttctagaatctgcaagtagatatttggagcgctttgaggccttcgttggaaaccggaatatcttcacaggaaaagtagatagaggcatgctcagaaacttttttgtcatatgtagattcaactcacagcgttgaacctttcttttgatagagcagttttgaaaaactcttttatcgaatctgcaagtagacatttggagtgctttgagggctgtggtgcaaaaggaaatgtcttcccatagaaactagactgaagcattctcagcaacttctttgtgacgtttgcattcatctcacagtgttgaacataccttttcatagagtagttttgaaacactatttttgtagaatctgcaagtggatatttggactgcattgaggccttcattggaaacgggaatgtcttcacataaacactagacagaagcattctcagaaactactttgtgatctgtctattcaactcacagagttgaaccttcctttttatggagcagttttgaaacactgtttttggagaatctgcaagtggatatttggagcgctttgaggcctatggtagaaaaagaaatatctgcctattacaactagacagaagcattctgagaaacttctttgtgatgtttgcattcaactaccagagttgaaccttccttttgatagggcagtttggaaacactctttttgtagaatctgcatgtggatatctggagcgatttgaggcctacggtccaaaaggaaatatcttcctgggaaaaaaagacgaaagcattctcagaaagtgctttgtgatatgtgcattcgactcaccgagttgaaacttttttttgatagagcagttttgaaacactctgtagaatctgaaagtggatagttggagctctttgacggctatggcggaaaagaaaatatattcacattaaagtagacagcagcattctcagaaacttctttaggatgtttgcagtaaactcacagagttgaacatacctttccgtagagcagttttgaaacactctgtttgtgggatccgcaagtggatatttggaccgctttgagacctttgctggaaatgggaatatcttgacgtataaactagacagaagcattctcagaaacttcttcgtgatgtgtgcagtctactcccgaatttgaatcttccttttcatgaagcagttttgaaacactctgtttgtgcaatccacaattggataattggaacgctttgatgcccatgttagaaaaggaaatatcctcatataaaaactagacagaaggattcacagaaaatgctttgtgatgtgtgcattcgaatcacggagttgaatctttcttttgttagagcagttttgaaacacggtttctgtggaatctgccagcggacacttggagcgctttgagggctatggtggagaaggaaatatcttcccataaaaactagaaagaagcattctcagaaacatgtatgtgaagcgtgcattcaactcacagagttgaaccttccttttgatacaacagttttgaaacactcttttgaacaattgcaggtgaatctttggagcgctttgaagcctttgttggaaatgggaatatcttctcacacaaactagtcagaagcattctcagaaacttctttgtgatgtgtgcgttgaacccagagagatgaacctttccttggaaagagcagttttgaaacgtgtttttgtaagatcggcaagcggataattggcttcgctttgtgtcctttggtggaaacgggaatatcttctaataaaaactagacagaaatattctcagaatctcctttgtgatgtgggcattcaactaacacagttgaacatttcttttcacagagcagttttgaaacactcttttggtagaatctgccagtggatatttggagcgcttggagggctattgggccaatggaaatatctgcccttgaaaactagacagaagcattctcagaaactgctttgtgatgtttgcattcaactcacagagttgaacataccttttcatagagcagttttgaaaacctctttttgtagaatctgcaagaggatattcggaccactttgaggccttcataggaaacagtaatatcttcacgtaaaaattagatagaaagcattgtcagaaagttctttgtgatgtgtgaattcaactcacagagttgaaccttcctttaatagagcagttttgaaacactctttttctagaatctgccagtagatatttggagcgctttgaggccttcgttggaaaccggaatatcttcacataaaaagtagatagaggcatgctcagaaacttttttgtcatatgtagattcaactcacagcgttgaacctttcttttgatagagcagttttgaaaaactcttttatcgaatctgcaagtagacatttggagtgctttgagggctgtggggcaaaaggaaatgtcttcccatagaaactagactgacgcattctcagcaacttctttgtgacgtttgcattcatctcacagtgttgaacatacctttccatagagtagttttgaagcactatttttgtagaatctgcaagtggatatttggactgctttgaggccttcatcggaaacgggaatatcttcacataaacactagacagaagcattctcagaaacttctttgtgatctgtccattcacctcacagagttgaaccttcctttttatggagcagttttgaaacactgtttgtgaagaatctgcaagtggatatttggagcgccttgaggccaatggtagaaaaagaaatatctgcctctaaatactagactgaagcattctgagaaacttctttgtgatgtttgcattcaactaccagagttgaaccttccttttgatagggcagtttggaaacactctttttgtagaatctgcatgtggatatctggagcgatttgaggcctatggtcaaaaaggaaatatcttcctgggaaaaatagacgaaagcattctcagcaactgctttgtgatatgtgcattcgactcaccgagttgaaacttttttttgatagagcagttttgaaacactctgtagaatctgaaagtggatatttggagatctttgagggctatggcggaaaagaaaatatattcacattaaagtagacagcagcattcccagaaacttctttaggttgtttgcagtaaactcacagagttgaacacacctttccgtagagcagttttgaaacactctgtttgtgggatccgcaagtggatatttggacccctttgagacctttgctggaaatgggaatatcttcacatataaactagacagaagcattctcagaaacttcttcgtgatgtgtgtattctactcccaaatttgaatcttccttttcatgaagcagttttgaaacactctatttgtgcattctacaattggatgattggaacgctttgatgcccatggtagaaaaggaaatatcctcatataaaaactagacagaaggattcacagaaaatgctttgtgatgtgtgcattcaaatcacggagttgaatctttcttttgttagagcagttttgaaacactgtttctgtggaatctgccagcggacccttggagcgctttgagggctacggtggagaaggaaatatcttcacataaaaactagaaagaagccttctcagaaacatgtatgtgaagcgtgcattcaactcacagagttgaaccttccttttgatagaacagttttgaaacactcttttgaacaattgcaggtgaatctttggagcgctttgaagcctttgttggaaatgggaatatcttcacacacaaactagccagaagcattctcagaaacttctttgtgatgtgtgcgttgaacccagagagatgaacctttcctttgatagagcagtttggaaacgtgtttttgtaagatcggcaagcggataattggcttcgctttgtgtcctttggtggaaacgggaatatcttctaataaaaactagacagaaatattctcagaatcttctttgtgatgtgggtattcaactaacacagttgaacctttcttttgacagagcagttttgaaacacacttttagtagaatctgcccgtggatatttggggcgctttgagggctattgtgcaaatggaaatatcttcacctaaatactagacagaagcattctcagaaactgctttgtgatgtttgcattcaactgacagagttgaacatacctcttcatagagcagttttgaaaacctctttttgtagaatctgcaagtggatattcggaccactttgaggccttcataggaaacagtaatatcatcacacaaaaactagatagaagcattgtcagaaagttcgttgtgatgtgtgaattcaactcacagagttgtagcttcctttaatagagcagttttgaaacactctttttctagagtctgcaagtagatatttggagcgctttgaggccttcgttggaaaccggaatatcttcacataaaaagtagatagaggcatgctcagaaacttttttgtcatatgtagattcaactcacagcgttgaacctttcttttgatagagcagttttgaaaaactcttttatcgaatctgcaagtagacatttggagtgctttgacggctctggtgcaaaaggaaatgtcttcccatagaaactagactgaagcattctcagcaacttcttggtgacgtttgcattcatctcacagtgttgaacatacctttccatagagtggttttgaaacactgtttttgtagaatcggcaagtgggtgtttggactgctttgaggccttcatcggaaacgggaatatcttcacataaacactagagagaagcactctcagaaacttctttgtgatctgtccattcaactcacagagttgaaccttcctttttctggagcagttttgaaacactctttttggagaatctgcaagtggatatttggagcgctttgaggcctatggtagaaaaagaaatatctgcctctaaaaaccagacagaagcattccgagaaacttctctgtgatgtttgcattcaagtagcagagttgaaccttccttttgatagggtagtttggaaacactctttttgtagaatctgcatgtggatatctgtagcggtttgaggcctacggtcaaaaaggaaatatcttcctgggaaaaatagacgaaagcattctcagaaagggctttgtgatatgcgcattcgactcaccgagttgaaacttttttttgatagagcagttttgaaacactctgtagaacctgaaagtggatatttggagctctttcagggctatgacggaaaagaaaatatattcacattaaagtagacagcagcattctcagaaacttctttaggatgtttgcagtaaactcacagagttgaacctacctttccgtagagcagttttgaaacactttgtttgtgggatccgcaagtggatatttggaccgctttgagacctttgctggaaatgggaatatcttcacatataaactagacagaagcattctcagaaacttcctcttgatgtgtgcattctactcccgaatttgaatcttccttttcatgaagcagttttgaaacactctgtttgtgcaatccacaattggataattggaacgctttgatgcccatggtagaaaaggaaatatcctcatataaaaactagacagaaggattcacagaaaatgctttgtgatgtgtgcattcaaatcaccggagttgaatctttcttttgttagagcagttttgaaacactgtttctgtggaatctgccagcggacacttggagcgctttgagggctatggtggagaaggaaatatcttcacataaaaactagaaagaagcattctcggaaacatttatgtgaagcgtgccttcaactcacagagttgaaccttccttttgatagaacagttttgaaacactcttttgaacaattgcaggtgaatctttggagcgctttgaaggctttgttggaaatgggaatatcttcccacacaaactagccagaagcattctcagaaacttctttgtgatgtgtgcgttgaacccagcagagatgaacctttcctttgatagagcagttttgaaacgtgtttttgtaaggtctgcaagcggataatgggcttcgctttgtgtcctttggtggaaacgggaatatcttctaataaaaactagacagaaatattctcagaatctcctttgtgatgtgggcattcaacttacacagttgaacatttcttttcacagagcagttttgaaacactcttttggtagaatctgccagtggatatttggagcgcttggagggctattgtgccaatggaaatatctgcccctgaaaactagacagaagcattctcagaaactgctttgtgatgtttgcattcaactcacagagttgaacctacctcttcatagagcagtttggaaaacctcttcttgtagaatctgcaagtgggtattcggaccactttgaggccttcataagaaacagtaatatcttcacataaaaactagatagaagcattgtcagaaagctctttgtgatgtgtgaattcaactcacagagttgaaccttcctttaatagagtagttttgaaacactctttttctagaatctgcaagtagatatttggagtgctttgaggccttcgttggaaaccggaatatcttcacaggaaaagtagatagaggcattctcagaaacttttttgtgatatgtagattcatctcacagcgttgaacctttcttttgatagagtagtttggaaaaactcttttatcgaatctgcaagtagacatttggagtgctttgagggctgtggtgcaaaaggaaatgtcttcccatagaaactagactgaagcattctcagcaacttctttgtgacgtttgcattgatctcacagtgttgaacatacctttgcatagagtagttttgaaacactatttttgtagaatctgcaagtggatatttggactgctttgaggccttcatcggaaacgggaatatcttcacataaacactggacagaagcatcctcagaaacttctttgtcatctgtccattcaactcacagagttgaaccttcctttttctggagcagttttgaaacactctttttggagaatctgcaagtggatatttggagcgctttgaggcctatggtagaaaaagaaatatctgcccctaaacaccagacagaagcattccgagaaacttctttgtgatgtttgcattcaactagcagagttgaaccttccttttgatagggcagtttggaaacactctttttgtagaacctgcatgtggatatctggagcggtttgaggcctacggtcaaaaaggaaatatcttcctgggaaaaatagacgaaagcattctcagaaactgctttgtgatatgtgcattcgactctccgagttgaaacttttttttgatagagcagttttgaaacactctgtagaatctgaaagtggatatttggagctcttcgagggctatggcggaaaagaaaatatattcacattaaactagacagcaagcattcccagaaacttctttaggttgtttgcagtaaactcacagagttgaacacacctttccgtagagcagttttgaaacactctgtttgtgggatccgcaagtggatatttggacccctttgagacctttgctggaaacgggaatatcttcacatataaactagacagaagcattctcagaaacttcttcggtgatgtgtgcattgtactcccaaatttgaatcttccttctcatggagcagttttgaaacactctgtttgtgcaatctacaattggagaattggaacgcttggattcccatggtagaaaaggaaatatcctcatataaaaactagacagaaggattcacagaaaatgctttgtgatgtgtgcattcaaatcacggagttgaatctttcttttgttagagcagttttgaaagactgtttctgtggaatctgccagcggacacttggagcgctttgagggctacggtggagaaggaaatatcttcacataaaaactagaaagaagcattctcagaaacatttatgtgaagcgtgcattcaactcacagagttgaaccttccttttgatacaacagttttgaaacactcttttgaacaattgcaggtgaatctttggagcgctttgaagcctttgttggaaatgggaatatcttcacacacaaactatccagaagcattctcggaaacttctttgtgatgtgtgcgttgaacccagagagatgaacctttcctttgatagagcagttttgaaacgtgtttttgtaagatctgcaagcggatagttggcttcgctttgtgtcctttggtggaaacgggaatatcttctaataaaaactagacagaaatattctcagaatcttcttcgtgatgtgggcattcaactaacacagttgaacctttcttttcacagagcagttttgaaacacccttttggtagaatctgccagtggatatttggagcgctttgagggctattgtgccaacggaaatatctgcccctaaaaactagacagaagcattctcagaaactgcttcgtgatgtttgcattcaactcacagggttgaacatacctctgcatggagcagttttgaaaacctctttttgtagaatctgcaagtggatattcggaccactttgaggccttcataggaaacagtaatatcttcacataaaaactagatagaagcattgtcagaaagttctttgtgatgtgtgaattcaactcacagagttgaaccttccttcaatagagcagttgtgaaacattctttttctagaatctgcaagtagatacttggagcgctttgaggccttcgttggaaaccggaatatcttcacaggaaaagtagatagaggcattctcagaaacttttttgtgatatgtagattcaactcacagcgttgaacctttctttggatggagcagttttgaaaaactcttttatcgaatctgcaggtagacatttggggtgctttgagggctgtggtgcaaaaggaaatgttcttcccatagaaactagactgaagcattctcagcaacttcttggtgacgtttgcattcatctcacagtgttgaacatacctttccatagagtggttttgaagcactgtttctgtagaatcggcaagtggatatttggactgctttgaggccttcatcggaaacgggaatatcttcacataaacactagagagaagcattctcagaaacttctttgtcatctgtccattcaactcacagagttgaaccttcctttttatggagcagttttgaaacactccttttggagaatctgcaagtggatatttggagcgctttgaggcctatggtagaaaaagaaatatctgcctctaaaaaccagacggaagcattccgagaaacttctgtgtgatgtttgcattcaactagcagagttgaaccttccttttgatagggcagtttggaaacactctttttgtagaatctgcatgtggatatctggagcggtttgaggcctacggtcaaaaaggaaatatcttcctgggaaaaatagacgaaagcattctcagaaagtgctttgtgatatgtgcattcgactcagcgagctgaaacttttttttgatagagcagttttgaaacactctgtagaatctgaaagtggatatttggagctctttgagggctatggcggaaaagaaaatatattcacattaaaaaagtagacagcagcattctcagaaacttctttaggatgtttgcagtaaactcgcagagtttaacatacctttccgtagagcagttttgaaacactctgtttgtgggatccgcaagtggatatttggaccgctttgagacctttgctggaaatgggaatatcttcacgtataaactagacagaagcattctcagaaacttctttttgatgtgtgcattgtactcccaaatttgaatcttccttctcatgtagcagttttgaaacactctgtttgtgcaatctacaattggataattggaaccctttgatgcccatggtagaaaaggaaatatcctcatataaaaactagacagaaggattcacagaaaatgctttgtgatgtgtgcattcaaatcacggagttgaatctttcttttgttagagcagttttgaaacactctttctgtggaatctgccagcggacacttggagtgctttgagggctgtggtggagaaggaaatatcttcccataaaaactagaaagaagcattctcagaaacatttatgtgaagcgtgcattcaactcacagagttgaaccttccttttgatacaacagttttgaaacacgcttttgaacaattgcaggtgaatctttggagcgctttgaagcctttgttggaaatgggaatatcttcacacacaaactagccagaagcattctcagaaacttctttgtgatgtgtgcgttgaacccagagagatgaacctttcctttgatagagcagttttgaaacgtgtttttgtaagatctgcaagtggataattgtcttcgctttgtgtcctttggtggaaacgggaatatcttctaataaaaactagacagagatattctcagaaatttctttgtgatgtgggcattcatctaacacagtcgaagatttcttttcacagagcagttttgaaacactcttttggtcgaatctgccagtggatatttggagcgctttgagggctattgtgccaatggaaatatctgcccctaaaaactagacagaagcattctcagaaactactttgtgatgtttgcattcaactcacagagttgaacatacctcttcatagagcagttttgaaaacctcttttggtagaatctgcaagtagatattcggaccactttgaggccttcataggaaacagtaataccttcacataaaaactagatagaagcattgtcaggaagttctttgtgatgtgtgaattaaactcacagagttgaaacttcctttaatagagcagtgttgaaacactctttttctagaatctgcaaggagatatttggggcgcttggaggccttcgttgtaaaccggaatatcttcacaggaaatgtagatagacgcattctcagaaactctttgtgatatgtagattcaactcacagcgttgaacctttctttggatggagcagttttgaaaaactcttttatcgaatctgcaggtagacatttggggtgctttgagggctgtggtgcaaaaggaaatgtcttcccatagaaactagcctgaagcattctcagcaaattccttgtgacgtttgcattcatctcacagtgttgaacatacctttccatagagtagttttgaaacactatttttgtagaatctgcaagtggatatttggactgctttgaggccttcatcggaaacgggaatatcttcacataaacactagacagaagcattctcagaaacttctttgtgatctctccattcaactcacagagttgaaccttcctttttatggagcagttttgaaacactccttttggagaatctgcaagtggatatttggagcgcgttgaggcctatggtagaaaaagaaatatctgcctctaaaaaccagacagaagcattctgagaaacttctttgtgatgtttgccttcaactaccagagttgaaccttccttttgatagggcagtttggaaacactctttttgtagaatctgcatgtggatatctggaacgatttgaggcctacggtccaaaaggaaatatcttcctgggaaagatagacgaaagcattctcagaaagtgctttgtgatatgtgcattcgactcaccgagttgaaacctttttttgatagagcagttttgaaacactctgtagaatctgaaagtggatatttggagctctttgagggctatggcggaaaagaaaatatattcacattaaagtagacagcagcattctcagaaacttctttaggatgtttgcagtaaactcacagagttgaacatacctttccgtagagcagttttgaaacactctgtctgtgggatccgcaagtggatatttgggccgctttgagacctttgctggaaatgggaatatcttcacatataaactagacagaagcattctcagaaacttcctcgtgatgtgtgcattctactcccgaatttgaatcttccttttcatgaagcagttttgaaacactctgtttgtgcaatccacaattggataattggaacgctttgatgcccatggtagaaaaggaaatatcctcatataaaaactagacagaaggattcacagaaaatgctatgtgatgtgtgcattcaaatcacggagttgaatctttcttttgtcagagcagttttgaaacactgtttctgtggaatctgccagcggacacttggagcgctttgagggctatggtggagaaggaaatatcttcccataaaaactagaaagaaatattctcagaatcttctttgtgatgtgggcattcaactaacacagttgaacatttcttttcacagaacagttttgaaacactcttttgaacaattgcaggtgaatctttggagcgctttgaagcctttgttggaaataggaatatattcacacacaaactagccagaagcattctcagaaacttctttgtgatgtgtgcgttgaacccagagagatgaacctttccttggatagagcagttttgaaacgtgtttttgtaagatctgcaagtggataattggcttcgctttgtgtcctttggtggaaacgggaatatcttctaataaaaactagacagaaatattctcacaatcgtctttgtgatgtgggcattcaactaacacagttgaacatttcttttcacagagcagttttgaaacactcttttgctagaatctgccagtggatacttggagcgctttgagggctattgtgccaatggagatatcttcccctaaaaactagacagaatcattctcagaaactgctttgtgatgtttgcattcaactcacagagttgaacctacctcttcatagagcagtttggaaaacctcttcttgtagaatctgcaagtggatattcggaccactttgagaccttcataggaaacagtaatatcttcacataaaaactagatagaagaattgtcagaaagttctttgtgatgtgtgaattcaactcacagagttgaaccttcctttaatagagtagttttgaaacactctttttctagaatctgccagtagatatttggagcgctttgaggccttcgttggaaaccggaatatcttcacataaaaagtagatagaggcattctcagaaactttttcgtgttatgtggattcaactcacagcgttgaacctttcttttgatagagcagttttgtaaaactcttttatcgaatctgcaagtagacatttggagtgctttgagggctgtggtgcaaaaggaaatgtcttcccatagaaactagactgaagcattctcagcaacttcttggtgacgtttgcattcatctcacagtgttgaacatacgtttccatagagtggttttgaaacactgtttttgtagaatcggcaagtggatatttggactgctttcaggccttcatcggaaacgggaatattcttcacataaacactagagagaagcattctcagaaacttctttgtgatctgtccattcaactcacagagttgaaccttcctttttatggagcagttttgaaacactgtttttggagaatctgcaagtggatatttggagcgctttgaggcctatggtagaaaaataaatatctgcctctaaaaactagacagaagcattctgagaaacttctttgtgatgtttgcattcaactaccagggttgaaccttgcttttgataggtcagttttgaaacactctttttgtagaatctgcatgtggatatctggagcgatttgaggcctacggtccaaaaggaaatatcttcctgggaaaaatagacgaaagcattctcagaaactgctttgtgatatgtgcattcgactctccgagttgaaactttttttggatagagcagttttgaaacactctgtagaatctgaaagtggatatttggagctctttgagggctatggcggaaaagaaaagatattcacattaaactagacagcagcattctcagaaacttctttaggatgtttgcagtaaactcacagagttgaacatacctttccgtagagcagttttgaaacactctgtttgtgggatccgcaagtggatatttggaccgctttgagacctttgctggaaatgggaatatcttcacgtataaaatagacagaagcattctcagaaacttcttcgtgatgtgtgcattctcctcccgaatttgaatcttctttttcatgaagcagttttgaaacactctgtttgtgcaatccacaattggataattggaacgctttgatgcccatggtagaaaaggaaatatcctcatataaaaactagacagaaggattcacagaaaatgctttgtgaagtgtgcattcaaatcacggagttgaatctttcttttgttagagcagttttgaaacactgtttctgtggaatctgccagcggacacttggagcgctttgagggctgtggtggagaaggaaatatcttcccataaaaactagaaagaagcattctcagaaccatttatgtgaagcgtgcattcaactcacagagttgaaccttccttttgatagaacagttttgaaacactcttttgtacaattgcaggtgaatatttggagggctttgaagcctttgttggaaatgggaatatcttcacacacaaagtagccagaagcattctcagaaacttctttgtgatgtgtgcgttgaacccagagagatgaacctttcctttgatagagcagttttgaaacgtgtttttgtaagatctgcaaggggataatgggcttcgctttgtgtcctttggtggaaacgggaatatcttctaataaaaactagacagaagcattctcagaaacttctttgtgatgtgtccattcaactcacagagttgaaccttcctttttatggagccgttttgaaacactgtttttgtagaatctgcaagtggatatttggagcgctttgaagcctatggtagagaaagaaatatctgcatatcaaaactagacagaagcattctcagaaactgctttgtgatgtttgcattcaactaccagagttgaacttccctcttcatagagcagttttgaaatcctctttttgtagaatctgcaagtggatatttggaccactttgaggccttcagaagaaatagtaatatcttcacataaaaactagatagtagcattctcagaaacttctttgtgatgtgtgaattcaactcacagagtagaaccttccttcaatagagcagttttcaaacactcttttggtagaatctgcaagtagatatttggagcactttgaggccttcattggaaactggaatatcttcacataaaaagtagatagaggcatgctcagaaacttttttgtcatatgtagattcaactcacagcgttgaacctttcttttgatagagcagtttcgaaaaactcttttatcgaatctgcaagtagacatttggagtgctttgagggctctggtgcaaaaggaaatgtcttcccatagaaactagactgaagcattctcagcaacttctttgtgacgtttgcattcatctcacagtgttgaacatacctttccatagagaagttttgaaacactaattttgtagaatctgcaagtggatatttggactgctttgaggccttcatcggaaacgggaatatcttcacataaacactagacagaagcattctcagaaactactttgtgatctgtccattcaactcacagagttgaaccttcctttttatggagcagttttgaaacactgtttttggagaatctgcaagtggatatttagagcgctttgaggcctatggtagaaaaagaaatatctgcctctaaaaactagacagaagcattccgagaaacttctttgtgatgtttgcattcaactagcagagttgaaccttccttttgatagggcagtttggaaacactctttttgtagaacccgcatgtggatatctggagcggtttgaggcctacggtcaaaaaggaaatatcttcctgggaaaaatagacgaaagcattctcagaaagtgctttgtgatatgtgcattcgactcaccgagttgaaacttttttttgatagagcagttttgaaacactctgcagaatctgaaagtggatatttggagctctttgagggctatggcggaaaagaaattatattcacattaaagtagacagcagcatgcccagaaacttctttaggatgtttgcagtaaactcacagagttgaacatacctttccgtagagcagttttgaaacactctgtttgtgggatccgcaagtggatatttggaccgctttgagacctttgctggaaacgggaatatcttcacatataaactagacagaagcattctcagaaacttcctcgtgatgtgtgcattctactcccgaatttgaatcttccttttcatgaagcagttttcaaacactctgtttgtgcaatccacaattggataattggaacgctttgatgcccatggtagaaaaggaaatatcctcatataaaaactagacagaaggattcacagaaaatgctttgtgatgtgtgctttcaaatcacggagttgaatctttcttttgtcagagcagttttgaaacactgtttctgtggaatctgccagcggacacttggagcgctttgagggctgtggtggagaaggaaatatcttcccataaaaactagaaagagaagcattctcagaaacatttatgtgaagcgtgcattcaactcacagagttgaaccttcctttggatacaacagttttgaaacactcttttgaacaattgcaggtgaatctttggagcgctttgaagcctttgttggaaatgggaatatcttcacacacaaactaaccagaagcattctcagaaacttctttgtgatgtgtgcgttgaacccagagagatgaacctttccgttgatagagcagttttgaaacgtgtttttgtaagatcggcaagcggataattggcttcgctttgtgtcctttggtggaaacgggaatatcttctaataaaaactagacagaaatattctcagaatctcctttgtgatgtgggcattcaactaacacagttgaacatttcttttcacagagcagttttgaaacacacttttggtcgaatctgccagtggatatttggagcgctttgagggctgttgtgccaatggaaatatctgcccctaaaatctagacagaagcattctcagaaactacttcgtgatgtttgcattcaactcagagagttgaacatacctcttcacagagcacttttgaaaacctctttttgtagaatctgcaagtggatattcggagcactttgaggccttcataggaaacagtaatatcttcgcataaaaactagatagaagcattgtcagaaagttctttgtgatgtgtgaattcaactcacagagttgaaccttcctttaatagagcagttttgaaacactctttttcgagaatctgccagtagatatttggagcgctttgaggccttcgttggaaaccggaatatcttcacataaaaagtagatagaggcattctcagaaacttttttgtgatatgtagattcaactcacagcgttgaatctttctttggatggagcagttttgaaaaactcttttatcgaatctgcaggtagacatttggggtgctttgcgggctctggtgcaaaaggaaaagtcttcccatagaaactagactgaagcattctcagcaacttctttgtgacgtttgcattcatctcacagtgttgaacatacctttccatcgagtacttttgaaacactgtttttgtagaatctgcaagtggatatgtggactgctttgaggccttcatcggaaacgggaatatcttcacataaacactagagagaagcattctcagaaacttctttgtggtctgtccattcaaatcacagagttgaaccttcctttttatggagcagttttgaaacactgtttttggagaatctgcaagtggatatttggagcgctttgaggcctatggtagaaaaagaaatatctgcctatgacaaatagacagaagcattctgagaaacttctttgtgatgtttgcattcaactaccagagttgaaccttccttttgatagggcagtttggaaacactctttttgtagaatctgcatgtggatatctggagtgatttgaggcctacggtccaaaaggaaatatcttcctgggaaaaaaagacgaaagaattctcagaaactgctttgtgatatgtgcattcgactcaccgagttgaaacttttttttgatagagcagttttgaaacactctgtagaatctgaaagtggatatttggagctctttgagggctatggcggaaaagaaaatatattcacattaaactagacagcagcattcccagaaacttctttaggatgtttgcagtaaactcacagagttgaacatacctttccgtagagcagttttgaaacactctgtttgtgggatccgcaagtggatatttggaccgctttgagacctttgctggaaacgggaatatcttcacatataaactagatagaagcattctcagaaacgtcttcgtgatgtgtgcattgtactcccaaatttgaatcttccttctcatggagcagttttgaaacactctgtttgtgcaatctacaattggagaattggaaggcttagatgaccgtggtagaaaaggaaatatcctcatataaaaactagacagaaggattcacagaaaatgctttgtgatgtgtgcattcaaatcacggagttgaatctttcttttgttagagcagttttgaaacactgtttctgtggaatctgccagcggacacttggagcgctttgagggttatggtggagaaggaaatatcttcacataaaaactagaaagaaagcattctcagtaaacatttatgtgaagcgtgcattcaactcacagagttgaaccttcctttggatacaacagttttgaaacactcttttgaacaattgcaggtgaatctttggagcgctttgaagcctttgttggaaatgggaatatcttcacacacaaactagccagaagcattctcagaaacttctttgtgatgtgtgcgttgaacccagagagatgaacctttccttggatagagcagttttgaaacgtgtttttgtaagatcggcaagcggataattggcttcgctttgtgtcctttggtggaaacgggaatatcttctaataaaaactagacagaaatattctcacaatcatctttgtaatgtgggcattcaactaacacagttgaacatttcttttcacagagcagttttgaaacactcttttcctagaatctgccagtggatacttggagcgctttgagggctattgtgccaatggagatatcttcccctaaaaactagacagaagcattctcagaaactgcttcgtgatgtttgcattcaactcacagggttgaacatacctctgcatagagcagttttgaaaacctctttttgtagaatctgccagtggatattcggaccactttgaggccttcataggaaacagtaatatcttcacataaaaactagatagaagcattgtcagaaagttctttgtgatgtgtgaattcaactcacagagttgaaccttcctttagtagagcagttttgaaacactctttttctagaatatgcaagtagatatttggagcgctttgaggccttcgttgaaaaccggaatatcttcacatagaaagtagatagaggcattctcagaaacttttttgtgatatgttgattcatctgacagcgttgaacctttcttttgatagagcagttttgaaaaactcttttgttgaatctgcaagtagacatttggagtgctttgagggctgtggtgccaaaggaaatgtcttcccatggaaactagactgaaagcattctcagcaacttctttgtgacgtttgcattgatctcacagtgttgaacatacctttgcatagagtagttttgaaacactatttttgtagaatctgcaagtggatatttggactgctttgaggcctccatcggaaacgggaatatcttcacataaacactggacagaagcattctcagaaacttctttgtgatctgtccattcaactcacagagttgaaccttcctttttatggagcagttttgaatcactgtgtttggagaatctgcaagtggatatttcgagcgctttgaggcctatggtagaaaaagaaatatctgcctctaaaaaccagacagaagcattccgagaaacttctttgtgatgtttgcattcaactagcagagttgaaccttccttttgatagggcagtttggaaacactctttttgtagaatctgcatgtggatatctggagcggtttgaggcctacggtcaaaaaggaaatatcttcctgggaaaaattgacgaaagcattctcagaaagtgctttgtgatatgtgcattcgactcaccgagttgaaacttttttttgatacagcagttttgaaacactctgtagaatctgaaagtggatatttggagctctttgagggctatggcggaaaagaaaatatattcacattaaagtagacagcagcattctcagaaacttctttaggatgtttgcagtaaactcacagagttgaacctacctttctgtagagcagttttgaaacactctgtttgtgggatccgcaaggggatatttggaccgctttgagacctttgctggaaatgggaatatcttcacatataaactagacagaagcattctcagaaacttcttcgtgttgtgtgcattctcctcccgaatttgaatcttccttttcatgaagcagttttgaaacactctgtttgtgcaatccacaattggataattggaacgctttgatgcccatggtagaaaaggaaatatcctcatataaaaactagacagaaggattcacagaaaatgctttgtgatgtgtgcattcaaatcacggagttgaatctttcttttgtcagagcagttttgaaacactgtttctgtggaatctgccaggggacacttggagcgctttgagggctatggtggagaaggaaatatcttcccataaaaactagagagaagcattctcagaaacatttatgtgaagcgtgcattcaactcacagagttgaaccttccttttgatagaacagttttgaaacactcttttgaacaattgcaggtgaatctttggagcgctttgaagcctttgttggaattgggaatatcttcacacacaaactagccagaagcattctcagaaacttctttgtgatgcgtgcgttgaacccagagagatgaacctttcctttgatagagcagttttgaaacgtgtttttgtaaggtctgcaagcggataatcggcttcgctttgtgtcctttggtggaaacgggaatatcttctaataaaaactagacagaaatattctcagaatctcctttgtgatgtgggcattcaactaacacagttgaacatttcttttcacagagcagttttgaaacactcttttggtagaatctgccagtggatatttggagcgcttggagggctactgtgccaatggaaatatctgcccctgaaaactagacagaagcattctcagaaactacttcgtgatgtttgcattcaacacacagagttgaacatacctcttcacagagcagttttgaaaacctctttctggagaatctgcaagtggatattcggaccactttgaggccttcataggaaacagtaatatcttcacataaaaactagatagaagcatggtcagaaagttctttgtgatgtgtgaattcaactcacagagttgaaccttcctttaatagagcagttttgaaacactctttttctagaatctgcaagtagatatttggagcgctttgaggccttcgttggaaaccggaatatcttcacaggaaaagtagatagaggcattctcagaagcttttttgtgatatgtagattcaactcacagtgttgaacctttctttggatggagcagttttgaaaaactcttttatcgaatctgcaggtagacattcggggtgctttgagggctgtggtgcaaaaggaaatgtcttcccatagaaactagactgaagcattctcagcaacttcttggtgacgtttgcattcatctcacagtgttgaacatacctttccatagagtggttttgaaacactgtttttgtagaatcggcaagtggatatttggactgctttgaggccttcatcggaaacgggaatatcttcaaataaacactagagagaagcattctcagaaacttctttgtggtctgtccattcaactcacagagttgaaccttcctttttatggagcagttttgaaacactgttttcggaggatctgcaagtggatatttggagcactttgaggcctatggtagaaaaagaaatatctgcctatgacaactagacagaagcattccgagaaacttctctgtgatgtttgaattcaagtagcagagttgaaccttccttttgatagggtagtttggaaacactctttttgtagaatctgcatgtggatatctggagcggtttgaggcctacggtcaaaaaggaaatatcttcctgggaaaaatagacgaaagaattctcagaaactgctttgtgatatgtgcattcgactcaccgagttgaaactttttttttgatagagcagttttgaaacactctgtagaatctgaaagtggatatttggagctctttgagggctatggcggaaaagaaaatatattcacattaaactagacagcagcattcccagaaacttctttaggatgtttgcagtaaactcacagagttgaacatacctttccgtagagcagtattgaaacactctgtttgtgggatccgcaagtggatatttggaccgctttgagacctttgctggaaacgggaatatcttcacatataaactagacagaagcattctcagaaacttcttcgtgatgtgtgcattctcctcgcgaatttgaatcttccttttcatgaagcagttttgaaacactctgtttgtgcaatccacaattggataattggaacgctttgatgcccatggtagaaaaggaagtatcctcatataaaaactagacagaaggattcacagaaaatgctttgtgttgtgtgcattcaaatcacggagttgaatctttcttttgtcagagcagttttgaaacactgtttctgtggaatctgccagcggacacttggagcgctttgagggctatggtggagaaggaaatatcttcccataaaaactagaaagaagcattctcggaatcatttatgtgaagcgtgccttcaactcacagagttgaaccttccttttgatagaacagttttgaaacactcttttgaacaattgcaggtgaatctttggagcgctttgaagcctttgttggaaatgggaatatcttcacacacaaactagccagaagcattctcagaaacttctttgtgatgtgtgcgttgaacccagagagatgaacctttcctttgatagagcagttttgaaacgtgtttttgtaagatgctgcaagcggataattggcttcgctttgtgtcctttggtggaaacgggaatatcttctaataaaaactagacagaaatattctcagaatcttctttgtgatgtgggcattcaacaaacacagttgaacatttcttttcacagagcagttttgaaacactcttttggtagaatctgccagtggatatttggagcgctttgagggctattgtgccaatggaaatatcttcccctaaaaactagacagaagcattctcagaaactacttcgtgatgtctgcattcaacacacagagttgaacatacctcttcagagagcagttttgaaaacctctttctgtagaatctgcaagtggatattcgggccactttgaggccttcataggaaacagtaatatcttcacataaaaactagatagaagcattgtcagaaagttctttgtgatgtgtgaattcaactcacagagttgaaccttccttcaatagagcagttttgaaacactctttttctagaatctgcaagtagatatttcgagcgctttgaggccttcgttggaaaccggaatatcttcacaggaaaagtagatagaggcattctcagaaacatttttgtgatatgtagattcaactcacagcgttgaacctttctttggatggagcagttttgaaaaactcttttatcgaatctgcaggtagacatttggggtgctttgagggctgtggtgcaaaaggaaatgtcttcccatagaaactagactgaatcattctcagcaacttcttggtgacgtttgcattcatctcacagtgttgaacatacctttgcatagagtagtttcgaaacactatttttgtagaatctgcaagtggacatttggactgctttgaggccttcatcggaaacgggaatatcttcacataaacactagacagaagcattctcagaaacttctttgtggtctgtccattcaactcacagagttgaaccttcctttttatggagcagttttgaaacactgtttttggaggatctgcaagtggatatttggagcgctttgaggcccatcgtagaaaaagaaatatctgcctatgacaactagacagaagcattctgagtaaacttctttgtgatgtttgcattcaactaccagagttgaatcttccttttgatagggcagtttggaaacactctttttgtagaatctgcatgtggatatctggagcgatttgaggcctacggtccaaaaggaaatatcttcctgggaaaaatagaggaaagcattctcagaaagtgctttgtgatatgtgcattcgactcaccgatttgaaacctttttttgatagagcagttttaaaacacactgtagaatctgaaagtggatatttggagctctttgagggctatggcggaaaagaaaatatattcacattaaagtagacagcagcattcccagaaacttctttaggatgtttgcagtaaactcacagagttgaacatacctttccgtagagcagctttgaaacactctgtttgtgggatccgcaagtggatatttggaccgctttgagacctttgctggaaacgggaatatcttcacatataaactggacagaagcattctcagaaacttcttcgtgatgtgtgcattctactcccgaatttgaatcttccttttcatgaagcagttttgaaacactctgtttgtgcaatccacaattggataattggaacgctttgatgtccatggtagaaaaggaaatatcctcatataaaaactagacagaaggattcacagaaaatgctttgtgatgtgtgcattcagatcacggagttgaatctttcttttgtgagagcagttttgaaacactgtttctgtgcaatctgccagcggacacttggagcgctttgagggctatggtggagaaggaaatatcttcacataaaaactagaaagaagcattctcagaaacatttatgtgaagcgtgccttcaactcacagagttgaaccttccttttgatacaacagttttgaaacactctttggaacaattgcaggtgaatctttggagcgctttgaagcctttgttggaaatgggaatatcttcacacacaaactagccagaagcattcccagaaacttctttgtgatgtgtgcgttgaacccagagagatgaacctttcctttgatagagcaggtttgaaacgtgtttttgtaagatctgcaagcggataattggctttgctttgtgtcccttggtgaaaacgggaatatcttctaataaaaactagacagaaatattctcacaatcatctttgtgatgtgggcattcaactaacacagttgaagatttcttttcacagagcagttttgaaacactcttttgctagaatctgccagtggatacttggagcgctttgagggatattgtgccaatggaaatatcttcccctaataactagacagaagcattctcagaaactacttcgtgatgtttgcattcaactcacagcgttgaacatacctcttcatagagcagttttgaaaacctctttctgtagaatctgcaagtggatattcggaccactttgaggccttcataggaaacagtaatatcttcacataaaaactagatagaagcattgtcagaaagttcttggtgatgtgtgaattaaactcacagagttgaaccttcctttaatagagcagttttgaaacactctttttctagaatctgcaagtagatatttggagcgctttgaggccttcgttggaaaccggaatatcttcacaggaaaagtagatagaggcattctcagaaacttttttgtgatatgtagattcaactcacagcgttgaacctttctttgcatggagcagttttgaaaaactcttttatcgaatctgcaggtagacatttggggtgctttgagggctctggtgcaaaaggaaaagtcttcccatagaaactagactgaagcattctcagcaacttcttggtgacgtttgcattcatctcacagtgttgaacatacctttccatagagtggttttgaaacactgtttttgtagaatcggcaagtggatatttggactgctttgaggccttcatcggaaacgggaatatcttcacataaacactacagagaagcattctcagaaacttctttgtcatctgtccattcaactcacagagttgcaccttcttttttatggagcagttttgaaacactccttttggagaatctgcaagtggatatttggagcgctttgaggcctatggtagaaaaagaaatatctgcctctaaaaaccagacagaagcattccgagaaactcctttgtgatgtttgcattcaactagcagagttgaaccttccttttgatagggcagtttggaaacactctttttgtagaatctgcatgtggatatctggagcggtttgaggcctacggtcagaaaggaaatatcttcctgggaaaaatagacgaaagcattctcagaaagtgctttgtgatatgtgcattcgactcaccgagttgaaacttttttttgatagagcagttttgaaacactctgcagaatctgaaagtggatatttggagctctttgagggctatggcggaaaagaaaatatattcacagtaaagtagacagcagcattcccagaaacttctttaggatgtttgcagtaaactcacagagttgaacatacctttccgtagagcagctttgaaaaactctgtgtgtgggatccgcaagtggatatttggaccgctttgagacctttgctggaaacgggaatatcttcacatataaactggacagaagcattctcagaaaattcttcgtgatgtgtgcattgtactcccaaatttgaatcttccttctcatggagcagttttgaaacactctgtttgtgcaatctacaattggagaattggaacgcttggatgcccgtggtagaaaaggaaatatcctcatataaaaactagacagaaggattcacagaaaatgctttgtgatgtgtgcattcaaatcacggagttaaatctttcttttgttagagcagttttgaaacactgtttctgtggaatctgccagcggacccttggagcgctttgagggctacggtggagaaggaaatatcttcacataaaaactagaaagaagcattctcggaaacatttatgtgaagcgtgcattcaactcacagagttgaaccttccttttgatagaacagttttgaaacactcttttgaacaattgcaggtgaatctttggagcgctttgaagcctttgttggaaatgggaatatcttcacacacaaactagccagaagcattctcagaaacttctttgtaatgtgtgcgttgaacccagagagatgaacctttccttcgatagagcagttttgaaacgtgtttttgtaagatcggcaagcggataattggcttcgctttgtgtcctttggtggaaacgggaatatacttctaataaaaactagacagaaatattctcagaatctcctttgtgatgtgggcattcaactaacacagttgaacatttcttttcacagagcagttttgaaacactcttttggtagaatctgcatgtggatatttggagcgcttggagggctattgtgccaatggaaatatctgcccctgaaaactagacagaagcattctcagaaactgcttcaggatgtttgcattcaactcacagagttgaacatacctctgcatagagcagttttgaaaacctctttttgtagaatctgcaagtggatattcggaccactttgaggccttcatgggaaacagtaatatcttcacataaaaactagatagaagcattgtcagaaagttctttgtgatgtgtgaattcaactcacagagttgaaccttcctttaatagagcagtcttgaaacactctttttctagaatctgcaagtagatatttggagcgctttgaggccttcgttggaaaccggaatatcttcacataaaacgtagatagaggcattctcagaaactttttttgtgatatgtagattcaactcacagcgttgaacctttctttgggtggagcagttttgaaaacctcttttatcgaatctgcaggtagacatttggggtgctttgagggctgtggtgcaaaaggaaatgtcttcccatagaaactagactgaagcattctcagcaacttctttttgacgtttgcattcatctcacagtgttgaacatacctttccatagagtagttttgaagcactatttttgtagaatctgcaagtggatatttggactgctttgagaccttcatcggaaacgggaatatcttcacataaacactagacagaagcattctcggaaattactttgtggtctgtccattcaaatcacagagttgaaccttcctttttatggagcagttttgaaacactgttttcggagaatctgcaagtggatatttggagcgctttgaggcctatggtagaaaaagaaatatctgcctatgacaactagacagaagcattccgagaaacttctttgtgatgtttgcattcaactagcagagttgaacctttcttttgatagggcagtttggaaaaactctttttgtagaatctgcatgtggatatctggagcggtttgaggcctacagtcaaaaaggaaatatcttcctgggaaaaatagacgaaagcattctcagaaactgctttgtgatatgtgcattcgactcaccgagttgaaactttttttggatagagcagttttgaaacactctgtagaatctgaaagtggatatttggagctctttgagggctatggagaaaagaaaatatattcacattaaactagacagcagcattcccagaaacttctttaggatgtttgcagtaaactcacagagttgaacacacctttccgtagagcagttttgaaacactctgtttgtggaatccgcaagtggatatttggaccgctttgagacctttgctggaaacgggaatatcttcacatataaactggacagaagaattctcagaaacttcttcgtgatgtgtgcattctactcccaaatttgaatcttccttttcatgaagcagttttgaaacactctatttgtgcattctacaattggatgattggaacgctttgatgcccatggtgggaaaaggaaatatcctcatataaaaactagacagaaggattcacagaaaatgctttgtgatgtgtgcattcaaatcacggagttgaatctttcttttgttagagcagttttgaaacactgtttctgtggaatctgccagcggacacttggagcgctttgagggctgtggtggagaaggaaatatcttcccataaaaactagaaagtagcattctcggaaacatttatgtgaagcgtgcattcaactcacagagttgaaccttccttttgatagaagagttttgaaacactcttttgaacaattgcaggtgaatctttggagcgctttgaagcctttgttggaaatgggaatatcttcacacacaaactagccagaagcattctcagaaacttctttgtgatgtgtgcgttgaacccagagagatgaacctttcctttgatagagcagttttgaaacgtgtttttgtaagatcggcaagcggataactggcttcgctttgggtcctttggtggaaacgggaatatcttctaataaaaactagacaaaaatattctcagaatcttctttgtgatgtgggcattcaactaacacagttgaacgtttcttttcacagagcagttttgaaacactcttttggtagaatctgccagtggatatttggagcgctttgagggctattgtgccaatggaaatatctgcccttaaaactagacagaagcattctcagaaactgctttgtgatgtttgcattccactcacagagttgaacataccttttcatagagcagttttgaaaacctctttttgtagaatctgcaagtggatattcggaccagtttgaggccttcataggaatcagtaatatcttcacataaaaactagatagaagcattgtcagaaagttgttggtgatgtgtgaattcaactcacagagttgaaccttcctttaatagagcagttttgaaacactctttttctagaatctgcaagtagatatttggagcgctttgaggccttcgttggaaaccggaatatcttcacaggaaaagtagatagaggcattctcagaaaattttcgtgatatgtggattcaactcacagcgttgaacctttcttttgatagagcagttttgtaaaactcttttatcgaatctgcaagtagacatttggagtgctttgagggctgtggtgcaaaaggaaatgtcttcccatagaaactagactgaagcattctcagcaacttctttgtgacgtttgcattcatctcacagtgttgaacatacctttccatagagtagttttcaaacactatttttgtagaatctgcaagtggatatttggactgctttgaggccttcatcggaaacgggaatatcttcacatcaacactagagagaagcattctcagaaactactttgtgatctgtccattcaactcacagagttgaaccttcctttttatggagcagttttgaaacaatgtttttggagaatctgcaagtggatatttggagcgctttgaggcctatggtagaaaaagaaatatctgcctctaaaaactagacagaagcattctgagaaacttctttgtgatgtttgcattcaactagcagagttgaaccttccttttgatagggcagtttggaaacacccttttgtagaatctgcatgtggatatctggagcgatttgaggcctacggtcaaaaaggaaatatcttcctgggaaaaatagacgaaagcattctcagtaaactgctttgtgatatgtgcattcgactctccgagttgaaacttttttttgatagagcagttttgaaacactctgtagaatctgaaagtggatatttggagctcttcgagggctatggcggaaaagaaaatatattcacattaaactagacagcagcattctcagaaacctctttaggatgtttgcagtaaactcacagagttgaacatacctttccgtagagcagttttgaaacactctgtttgtgggatccgcaagtggatatttggaccgctttgagacctttgctggaaatgggaatatcttcacatataaactagacagaagcattctcagaaacttcttcatgatgtgtgcattctactcccaaatttgaatcttccttttcatgaagcagttttgaaacactctgtttgtgcaatccacaattggataattggaacgctttgatgcccatggtagaaaaggaaatatcctcatataaaaactagacagaaggattcacagaaaatgctttgtgatgtgtgcattcaaatcacggagttgaatctttcttttgtcagagcagttttgaaacactgtttctgtggaatctgccagcggacacttggagcgctttgagggctatggtggagaaggaaatgtcttcccataaaaactagaaagaagcattctcagaaacatttatgtgaagcgtgcattcaactcacagagttgaaccttccttttgatagaagagttttgaaacactcttttgaacaattgcaggtgaatatttggagcgctttgaagcctttgttggaaatgggaatatcttcacacacaaactagccagaagcattctcagaaacttctttgtgatgtgtgcattgaacccagagagatgaacctttcctttgatagagcagttttgaaacgtgtttttgtaagatctgcaagcggatagttggcttcgctttgtgtcctttggtggaaacgggaatatcttctaataaaaactagacagagatattctcagcaaacttctttgtgatgtgggcattcaactgacacagttgaacatttcttttcacagagcagttttgaaacactcttttggtcgaatctgccagtggatatttggagcgctttgagggctattgtgccaatggaaatatctgcccctaaaaactagacagaagcattctcagaaactacttcgtgatgtttgcattcaactcacagagttgaacatacctcttcacagagcagtattgaaaacctctttttgtagaatctgcaagtggatattcggagcactttgaggccttcataggaaacagtaatatcttcgcataaaaactagatagaagcattgtcagaaagttctttgtgatgtgtgaattcaactcacagagttgaaccttcctttaatagagcagttttgaaacactctttttctagaatctgcaagtagatatttggagcgcttggaggccttcgttggaaaccggaacatcttcacaggaaatgtagatagaggcattctcagaaactttttcgtgatatgtggattcaactcacagcgttgaacctttcttttgatagagcagttttgtaaaactcttttatcgaatctgcaagtagacatttggagtgcgttgaaggctgtggtgcaaaaggaaatgtcttcccatagaaactagactgaagcattctcagcaacttctttgtgacgtttgccttcatctcacagtgttgagcatacctttccatagagttgttttgaagcactatttttgtagaatctgcaagtggatatttggactactttgaggccttcatcggaaacgggaatatcttcacataaacactagacagaagcattctcagaaacttctttgtcatctgtccattcaactcacagagttgaaccttcctttttatggagcagttttgaatcactgtttttggggaatctgcaagtggatatttcgagcgctttgaggcctatggtagaaaaagaaatatctgcctctaaaaaccagacagaagcattctgagaaacttctttgtgatgtttgcattcaactagcagagttgaaccttccttttgatagggcagtttggaaacactctttttgtagaatctgcatgtggttatctggagcggttttaggcctacggtcaaaaaggaaatatcttcctgggaaaaatagacgaaagcattctcagaaactgctttgtgatatgtgcattcgactcaccgagttgaaactttgttttgatagagcagttttgaaacactctgtagaatctgaaagtggatatttggagctctttgagggctatggcggaaaagaaaatatattcacattaaactagacagcagcattcccagaaacttctttaggatgtttgcagtaaactcacagtagttgaacatacctttccgtagagcagttttgaaacactctgtttgtgggatccgcaagtggatatttggaccgctttgagacctttgctggaaacgggaatatcttcacatataaactagacagaaacattctcagaaacttcttcgtgatgtgtgcattctactcccgaatttgaatcttccttttcatgaagcagtttagaaacactctgtttgtgcaatccacaattggataattggaacgctttgatgcccatggtagaaaaggaaatatcctcatataaaaactagacagaaggattcacagaaaatgctttgtgatgtgtgcattcaaatcacggagttgaatctttcttttgttagagcagttttgaaacactgtttctgtggaatctgccagcggacacttggagcactttgagggctatggtggagaaggaaatatcttcccataaaaactagaaagaagcattctcagaaccatttatgtgaagcgtgcgttcaactcacagagttgaaccttccttttgatagaacagttttgaaacactcttttgaacaattgcaggtgaatatttggagggctttgaagcctttgttggaaatgggaatatcttcacacacaaactagacagaagcattctcagaaacttctttgtgatgtgtgcgttgaacccagggagatgaacctttcctttgatagagcagttttgaaacgtgtttttgtaagatctgcaagcggataatttgtctcgctttgtgtcctttggtggaaacgggaatatcttctaataaaaactagacagaaatattctcagaatcttctttgtgatgtgggcattcaactaacacagttgaacctttcttttcacagagcagtttggaaacacccttttggtagaatctgccagtggatatttggagcgctttgagggctattgtgccaacggaaatatctgcccctaaaaactagacagaagcatgctcagaaactgctttgtgatgttggcattcaactcacagagttgaacatacctcttcatagagcagttttgaaaacctctttttgtagaatctgcaagtggatattcggaccactttgaggccttcataggaaacagtaatatcttcacataaaaactagatagaagcattgtcagaaagttctttgtgatgtgtgaattcaactcacagagttgaaccttcctttaatagagcagttttgaaacactcttcttctagaatctgtaagtagatatttggagcgctttgaggccttcgttggaaaccgaaatatcttcacagaaaaagtagatagaggcattctcagaaacttttttgtgatatgttgattccactcacagcgttgaacctttcttttgatagagcagttttgaaaaactcttttatcgaatctgcaggtagacatttggtgtgctttgagggctgtggtgcaaaaggaaatgtcttcccatagaaactagactgaaacattctcagcaacttctttgtgacgtttgcattcatctcacagcgttgaacatacctttccaaagagtagttttgaaacactatttttgtagaatctgcaagtggatatttggactgctttgaggccttcatcggaaacgggaatatcttcacataaacactagagagaagcattctcagaaacttctttgtgatctgtccattcaactcacagagttgaaccttcctttttatggaacagttttgaaacactccttttggagaatctgcaagtggatatttggagcgctttgaggcctatggtagaaaaagaaatatctgcctctaaaaaccagacagaagcattccgagaaacttctttgtgatgtttgcattcaactagcagagttgaaccttccttttcatagggcagtttggaaacactctttttgtagaatctgcatgtggatatctggagcggtttgaggcctacggtcaaaaaggaaatatcttcctgggaaaaatagacgaaagcattctcagaaactgctttgtgatatgggcattcgactcaccgagttgaaacttttttttgatagagcagttttgaaacactctgtagagatctgaaagtggatatttggagctctttgagggctatggcggaaaagaaaatatattcacattaaactagagaggagcattcccagaaacttctttaggatgtttgcagtaaactcacagagttgaacatacctttccgtagagcagttttgaaacactctgtttgtgggatccgcaagtgtatatttggaccgctttgagacctttgctggaaacgggaatatcttcacatataaactagacagaagcattctcagaaacttcttcgtgatgtgtgcattctcctcgcgaatttgaatcttccttttcatgaagcagttttgaaacactctgtttgtgcaatccacaattggataattggaacgctttgatgcccatggtagaaaaggaaatatcctcatataaaaactagacagaaggattcacagaaaatgctttgtgatgtgtgcattcaaatcacggagttgaatctttcttttgttagagcagttttgaaacactgtttctgtggaatctgccagcggacacttggagcactttgagggctgtggtggagaaggaaatatcttcccataaaaactagaaagaagcattctcagaaacatttatgtgaagcgtgcattcaactcacagagttgaaccttccttttgatacaacagttttgaaacacccttttgaacaattgcaggtgaatctatggagcgctttgaagcctttgttggaaatgggaatatcttcacacacaaactagccagaagcattctcagaaacttctttgtgatgtgtgcgttgaacccagagaggtgaacctttcctttgatagagcagttttgaaacgtgttttggtaagatctgcaaacggataattgacttcgctttgtgtattttggtggaaacgggaatatcttctaataaaaactagacagaaatattctcagaatctcctttgtgatgtgggcattcaactaacacagttgaacatttcttttcacagagcagttttgtaacacacttttggtagaatctgccagtggatattttgagcgctttgagggctgttgtgccaatggaaatatctgcccctaaaatctagacagaagcattctcagaaactgcttcgggatgtttgcattcaactcacagagttgaacatacctctgcatagagcagttttgaaaacctctttttgtagaatctgcaagtggatattcggaccactttgaggccttcatgggaaacagtaatatcttaacataaaaactagatagaagcattgtcagaaagttctttgtgatgtgtgaattcaactcacagagttgaaccttccttcaatagagcagttttgaaacactctttttctagaatctgcaagtagatatttggagtgcttggaggccttcgttggaaaccggaatatcttcacaggaaaagtagatagaggcattgtcagaaacttttttgtgatatgtagattcaactcacagcgttgaacctttctttggatggagcagttttgaaaaacccttttatcgaatctgcaggtagacattcggggtgctttgagggctgtggtgcaaaaggaaatgtcttcccatagaaactagactgaagcattctcagcaacttctttgtgatgtttgcattcatctcacagtgttgaacatacctttgcatagagtagttttgaaacactatttttgtagaatctgcaagtggatatttggactgctttgaggccttcatcggaaacgggaatatcttcacataaacactggacagaagcattctcagaaacttctttgtgatctgtccgttcaacacacagagttgaaccttcctttttatggagcagttttgaaacactgtttgtggagaatctgcaagtggatatttggagcgccttgaggccaatggtagaaaaagaaatatctgcctctaaatactagactgaagcattctgagaaacttctttgtgatgtttgccttcaactaccagagttgaaccttccttttgatagggcagtttggaaacactctttttgtagaatctgcatgtggatatctggagcgatttgaggcctacggtccaaaaggaaatatcttcctgtgaaagatagacgaaagcattctcagaaagtactttgtgatatgcgcattcgactcaccgagttgaaacttttttttgatagagcagttttgaaacactctgtagaatctgaaagtggatatttggagctctttgagggctatggcggaaaagaaaatatattcacattaaagtagacagcagcattctcagaaacttctttaggatgtttgcagtaaactcacagagttgaacatacctttccgtagagcagttttgaaacactctgtttgtgggatccgcaagtggatatttggaccgctttgagacctttgctggaaatggggatatcttcacgtataaactagacagaagcattctcagaaacttcttcgtgatgtgtgcattgtactcccaaatttgaatcttccttctcatggagcagttttgaaacactctgtttgtgcaatctacaattggagaattggaacgcttggatgaccgtggtagaaaaggaaatatcctcatataaaaactagacagaaggattcacagaaaatgctttgtgatgtgtacattcaaatcacggagttgaatctttcttttgtcagagcagttttgaaacactgtttctgtggaatctgccagcggacacttggagcgctttgagggctatggtggagaaggaaatatcttcccataaaaactagagagaagcattctcagaaacatttatgtgaagcttgcattcaactcacagagttgaaccttccctttgatacaacagttttgaaacacccttttgaacaattgcaggtgaatctttggagcgctttgaagcctttgttggaaatgggaatatcttcacacacaaactagccagaagcattctcagaaacttctttgtgatgtgtgcgttgaacccagagagatgaacctttcctttgatagagcagttttgaaacgtgtttttgtaaggtcggcaagtggataattggcttcgctttgtgtcctttggtggaaacgggaatatcttctaataaaaactagacagaaatattctcagaatctcctttgtgatgtgggcattcaactaacacagttgaacatttcttttcacagagcagttttgaaacactcttttggtcgaatctgccagtggatatttggagcgcttggagggctattgtgccaatggaaatatctgcccccgaaaactagacagaagcattctcagaaactgcttcgtgatgtttgcattcaactcacagggttgaacatacctctgcatagagcagttttgaaaacctctttttgtagaatctgcaagtggatattcggaccactttgaggccttcataggaaacagtaatatcttcacataaaaactagacagaagcattgtcagaaagttctttgtgatgtgtgaattcaactcacagagttgaaccttcctttaatagagcagttttgaaacactctttttctagaatctgccagtagatatttggagcgctttgaggccttcgttggaaaccagaatatcttcacataaaaagtagatagatgcattctcagaaactttttcgtgatatgtagattcaactcacagcgttgagcctttcttttgatagagcagtttcgtaaaactcttttatcgaatctgcaggtagacatttggagtgctttgagggctgtggtgcaaaaggaaatgtcttcccatagaaactagactgaagcattctcagcaacttcttggtgacgtttgcattcatctcacagtgttgaacatacctttccctagagtggttttaaaacactgtttttgtagaatcggcaagtggatatttggactgctttgaggccttcatcggaaaagggaatatcttcacataaacactagagagaagcattctcagaaacttctttgtcatctgtccattcaactcacagagttgaaccttcctttttatggagcagttttgaaacactccttttggagaatctgcaggtggatatttggagtgctttgaggcctatggtagaaaaagaaatatctgcctctaaaaaaaagacagaagcattccgagaaacttctttgtgatgtttgcattcaactcgcagagttgaaccttccttttgatagggcagtttggaaacactctttttgtagaatctgcatgtggatatctggagcggtttgaggcctacggtcaaaaaggaaatatcttcctgggaaaaatagacgaaagcattctcagaaagtgctttgtgatatgcgcattcgactcaccgagttgaaacttttttttgatacagcagttttgaaacactctgtagaatctgaaagtggatatttggagctctttgagggctatggcggaaaagaaaatatattcacgttaaaaaagtagacagcagcattcccagaaacttctttaggatgtttgctgtaaactcacagagttgaacatacctttccgtagagcagttttgaaacactctgtttgtgggatccgcaagtggatatttggaccgctttgagacctttgctggaaacgggaatatcttcacatataaactagacagaagcattctcagaaacttcttcgtgatgtgtgcattctactcccaaatttgaatcttccttctcatgaagcagttttataactctctatttgtgcaatttacaattggataattggaaccctttgatgcccatggtagaaaaggaaatatcctcatataaaaactagacagaaggattcacagaaaatgctttgtgatgtgtgcattcaaatcacggagttgaatctttcttttgttagagcagttttgaaacactgcttctgtggaatctgccagcggacacttggagcgctttgagggctatggtggagaaggaaatatcttcacataaaaactagaaagaagcattctcagaaccatttatgtgaagcgtgcattcaactcacagagttgaaccttccttttgatagaacagttttgaaacactcttttgaacaattgcaggtgaatatttggagggctttgaagcctttgttggaaatgggaatatcttcacacacaaactagccagaagcattctcagaaacttctttgtgatgtgtgcgttgaacccagagagatgaacctttcctttgataaagcagttttgaaacgcgtttttgtaagatcggcaagcggataattggcttcgctttgtgtcctttggtggaaacgggaatatcttctaataaaaactagacagagatattctcagaaatttctttgtgatgtgggcattcatctaacacagtcgaagatttcttttcacagagcagttttgaaatactcttttggtcgaatctgccagtggatatttggagcgctttgagggctattgtgccaatggaaatatctgcccctaaaaactagacagaagcattctcagaaactacttcatgatgtttgcattcaactcagagagttgaacatacctcttcacagagcagttttgaaaacctctttttgtagaatctgcaagtggatattcggagcactttgaggccttcataggaaacagtaatatacttcgcataaaaactagatagaagtattgtcagaaagttctttgtgatgtgtgaattcaactcacagagttgaaccttccttcaatagagcagttgtgaaacactctttttctagaatctgcaagtagatacttggagcgctttgaggccttcgttggaaaccggaatatcttcacaggaaaagtagatagaggcattctcagaaacttttttgtgatatgtagattcaactcacagcgttgaacctttctttggatggagcagttttgaaaaactcttttatcgaatctgcaggtagacattcggcgtgctttgagggctgtggtgcaaaaggaaatgtcttcccatagaaactagactgaagcattctcagcaacttcttggtgacgtttgcatttatctcacagtgttgaacatacctttccatagagtggttttgaaacactgtttttgtagaatcggcaattggatatttggactgctttgaggccttcatcggaaacgggaatatcttcacataaacactagagagaagcattctcagaaacttctttgtgatctgtccattcaactcacagagttgaaccttcctttttatggagcagttttgaaacactccttttggagaatctgcaagtggatatttggagcgctttgaggcctatggtagaaaaagaaatatctgcctctaaaaaccagacagaagcattctgagaaacttctttgtgatgtttggcattcaactaccagagttgaaccttccttttgatagggcagtttggaaacactctttttgtagaatctgcatgtggatatctggagcgatttgaggcctacggtccaaaaggaaatatcttcctgggaaaaatagacgaaagcattctcagaaagtgctttgtgatatgtgcattcgactcaccgagttgaaacttttttttgatagagcagttttgaaacactctgtagaatctgaaagtggatagttggagctctttgagggctatggcggaaaagaaaatatattcacattaaagtagacagcagcattctcagaaacttctttaggatgtttgcagtaaactcacagagttgaacctacctttccgtagagcagttttgaaacactctgtttgtgggatccgcaaggggatatttggaccgctttgagacctttgctggaaatgggaatatcttcacatataaactagacagaagcattctcagaagcttcttcgtgatgtgtgcattctactcccaaatttgaatcttccttttcatgaagcagttttgaaacactctgtttgtgcaatccacaattggataattggaacgctttgatgcccatggtagaaaaggaaatatcctcatataaaaactagacagaaggattcacagaaaatgctttgtgatgtgtgcattcaaatcacgcagttgaatctttcttttgttagagcagttttgaaacactgtttctgtggaatctgccagcggacacttggagcgctttgagggctatggtggagaaggaaatatcttcacataaaaactagaaagaaagcattctcagaaccatttatgtgaagcgtgcattcaactctcagtagttgaaccttccttttgttagaacagttttgaaacactcttttgaacaattgcaggtgaatatttggagcgctttgaagcctttgctggaaatgggaatatcttcacgcacaaagtagccagagcattctcagaaacttctttgtgatgtgtgcgttgaacccagagagatgaacctttcctttgatagagcagttttgaaacgtgtttttgtaagatctgcaagcggataattggcttctctttgtgtcctttggtggaaacgggaatatcttctaataaaaactagacagaaatattctcagaatctcctttgtgatgtgggcattcaactaacacagttgaacatttcttttcacagagcagttttgaaacacccttttggtagaatctgccagtggatatttggagcgcttggagggctattgtgccaatggaaatatctgcccctgaaaactagacagaagcattctcagaaactgcttcgtgatgtttgcattcaactcacagacttgaacatacctctgcatagagcacttttggaaacctctttttgtagaatctgcaagtggatattcggaacactctgaggccttcataggaaacagtaatatcttcacataaaaactagataaaagcattgtcagaaagttctttgtgatgtgtgaattcaactcacagagttgaaccttcctttaatagagcagttttgaaacactctttttctagaatctgcaagtagatatttggagcgctttgaggccttcgttggaaaccagaatatcttcacaggaaaagtagatagaggcattctcagaaaacttttttgtgatatgtagattcaactcacagcgttgaacctttctttggatggagcagttttgaaaaactcttttatcgaatctgcaggtagacattcggggtgctttgagggctgtggtgcaaaaggaaatgtcttcccatagaaactagactgaagcattctcagcaacttctttgtgatgtttgcattcatctcacagtgttgaacatacctttccatagggtagctttgaagcactatttttgtagaatctgcaagtggatatttggactgctttgaggccttcatcggaaacgggaatatcttcacataaacactagacagaagcattctcagaaacttctttgtcatctgtccattcaactcacagagttgaaccttccttattctggagcagttttgaaacactctttttggagaatctgcaagtggatatttggagcgctttgaggcctatggtagaaaaagaaatatctgcccctaaacaccagacagaagcattctgagaaacttctttgtgatgtttgcattcaactaccagatttgaaccttccttttgatagggcagtttggaaacactctttttgtagaatctgcatgtggacatctggagcgatttgaggcctacggtcaaaaaggaaatatcttcctgggaaaaatagacgaaagcattctcagaaagtgctgtgtgatatgtgcattcgactccccgagttgaaacttttttttgatagagcagttttgaaacactctgtagaatctgaaagtggatatttggagctctttgagggctatggcggaaaagaaaatatattcacattaaagtagacagcagcattcccagaaacttctttaggatgtttttcaagttaaactcacagagttgaacatacctttccgtagagcagttttgaaacactctgtttgtgggatccgcaagtggatatttggacccctttgagacctttgctggaaacgggaatatcttcacatataaactagacagaagcattctcagtaaacttcttcgtgatgtgtgcattctactcccgaatttgaatcttccttttcatgaagcagttttgaaacactctgtttgtgcaatccacaattggataaatggaacgctttgatgcccatggtagaaaaggaaatatcctcatataaaaactagacagaaggattcacagaaaatgctttgtgatgtgtgcattcaaatcacggagttgaatctttcttttgtgagagcagttttgaaacactgtttctttggaatctgccagcggactcttggagctctttgagggctatggtggagaaggaaatatcttcccataaaaactagaaagaagcattctcagaaccatttatgtgaagcgtgcgttcaactcacagagttgaaccttccttttgatagaacagttttgaaacactcttttgaacaattgcaggtgaatatttggagggctttgaagcctttgttggaaatgggaatatcttcacacacgaactagccagaagcattctcagaaacttctttgtgatgtgtgcgttgaacccagagagatgaacctttcctttgatagagcagttttgaaacgtgtttttgtaaggtctgcaagcggataatgggcttcgctttgtgtcctttggtggaaacgggaatatcttctaataaaaactagacagaaatattctcacaatcatctttgtgatgtgggcattcaactaacacagttgaacatttcttttcacagagcagttttgaaacactcttttgctagaatctgccagtggatacttggagcgctttgagggctattgtgccaatggagatatcttcccctaaaaactagacagaagcattctcagaaactactttgtgatgtttgcattcaactcacagagttgaacatacctcttcatagagcagttttgaaatcctctttttgtagaatctgcaagtggatattcagaccactttaaggccttcataggaaacagtaataccttcacgtaaaaactagatagaagcattgtcagaaagttctttgtgatgtgtgaattcaactcacagagttgaaccttcctttaatagagcagttttgaaacactcttcttctagaatctgcaagtagatatttggagcgctttgaggcctttgttggaaaccggaatatcttcacagaaaaagtagatagaggcattctcagaaacttttttgtgatatgtagattcaactcacaacgttgaacctttcttttgatagagcagttttgaaaaactcttttatcgaatctgcccgtagaccttttgagtgctttgagggctgtggtgcaaaaggaaatgtcttcccatagaaactagactgaagcattgtcagcaacttcttggtgacgtttgcattcatctcacagcgttgaacatacctttccatagagtggttttgaaacactgtttttgtagaatcggcaagtggatatttggactgctttgaggccttcatcggaaacgggaatatcttcacataaacactagagagaagcattctcagaaacttctttgtgatctgtccattcaactcacagagttgaaccttcctttttatggagcagttttgaaacactgttcttggagaatctgcacgtggatatttggagcgctttgaggcctgtggtagaaaaagaaatatctgcctctaaaaactagacagaagcattctgagaaacttctttgtgatgtttgcattcaagtaccagagttgaaccttccttttgatagggcagtttggaaacactctttttgtagaatctgcatgtggatatctggagcgatttgaggcctacggtcaaaaaggaaatatcttcctgggaaaaatagacgaaagcattctcagaaactgctttgtgatatgcgcattcgactcaccgagttgaaacttttttttgatagagcagttttgaaacactctgtagaatctgaaagtggatatttggagctctttgagggctatggcggaaaagaaaatatattcacattaaagtagacagcagcattcccagaaacttctttaggatgtttgcagtaaactcacagagttgaacatacctttccgtagagcagttttgaaacactctgtttttgggatccgcaagtggatatttggaccactttgagacctttgctggaaacgggaatatcttcacatataaactagacagaagcattctcagaaacttcttcatgatgtgtgcattctaatcccaaatttgaatcttccttttcatgaagcagttttgaaacactctatttgtgcattctacaattggatgattggaacgctttgatgcccatggtagaaaaggaaatatcctcatataaaaactagacagaaggattcacagaaaatgctttgtgatgtgtgcattcaaatcacggagttgaatctttcttttgtgagagcagttttgaaacactgtttctgtggaatctgccagcggacacttggttcgctttgagggctatggtggagaaggaaatatcttcccataaaaactagaaagaagcattctcagaaacatttatgtgaagcgtgcattcaactcacagagttgaaccttccttttgatacaacagttttgaaacactcttttgaacaattgcaggtgaatctttggagcgctttgaagcctttgttggaaaagggaatatcttcacacacaaactagccagaagcattctcagaaacttctttgtgatgtgtgcgttgaacccagagagatgaacctttcctttgatagagcagtattgaaacgtgtttttgtaagatctgcaagcggatagttggcttcgctttgtgtcctttggtggaaacgggaatatcttctaataaaaactagacagaaatattctcagaatcttctttgtgatgtgggcattcaactaacacagttgaacgtttcttttcacagagcagttttgaaacactcttttggtagaatctgccagtggatatttggagcgctatgagggctcttgtgccaacggaaatatctgcccctaaaaactagacagaagcattctcagaaactgctttgtgatgtttgcattcaactcacagagttgaacataccttttcatagagcagttttgaaaacctctttttgtagaatctgcaagaggatattcggaccactttgaggccttcataggaaacagtaatatcttcacgtaaaaactagatagaagcattgtcagaaagttctttgtgatgtgtgaattcaactcacagagttgaaccttcctttaatagagcagttttgaaacactctttttctagaatctgcaagtagatatttggagcgctttgaggccatcgttggaaactggaatatcttcacataaaaagtagacagaggcattctcagaaacttttttgtgatatgtagattcaactcacagtgttgaacctttctttggatggagcagttttgaaaaacccttttatcgaatctgcaggtagacatttggggtgctttgagggctgtggtgcaaaaggaaatgtcttcccatagaaactagactgaagcattctcagcaacttctgtgtgacgtttgcattcatctcacagtgttgaacatacctttccatagagtagttttgaaacactgtttttgtagaatcggcaagtggatatttggactgctttgaggccttcatcggaaacgggaatatcttcacataaacactagagagaagcattctcagaaacttctttgtggtctgtccattcaactcacagagttgaaccttcctttttatggagcagttttgaaacactgtttttggaggatctgcaagtggatatttggagcgctttgaggcctacggtagaaaaagaactatctgcctatgacaactagacagaagcattctgagaaacttctttgtgatgtttgcattcaactaccagagttgaaccttccttttgatagggcagtttggaaacactctttttgtagaatctgcatgtggatatctggagcgatttgaggcctacggtccaaaaggaaatatcttcctgggaaaaatagaggaaagcattctcagaaactgctttgtgatatgtgcattcgactcaacgagttgaaacttttttttgatagagcagttttgaaacactctgtagaatctgaaagtggatatttggagctctttgagggctatggcggaaaagaaaacatattcacattaaactggacagcagcatactcagaaacttctttaggatgtttgcagtaaactcacagagttgaacatacctttccgtagagcagttttgaaacactctgtttgtgggatccgcaagtggatatttggaccgctttgagacctttgctggaaatgggaatatcttcacatataaactagacagaagcattctaagaaacttcttcttgatgtgtgcattctactcccgaatttgaatcttccttctcatgaagcagttttgaaacactctatttgcgcaatctactattggataattggaacgctttgatgcccatggtagaaaagaaaatatcctcatataaaaactagacagaaggattcacagaaaatgctttgtgatgtgtgcattcaaatcacggagttgaatctttcttttgttagagcagttttgaaacactgtttctgtggaatctgccagcggacacttggagcgctttgagggctacgatggagaaggaaatatcttcacataaaaactagaaagaagcattctcagaaacatttatgtgaagcgtgcattcaactcacagagttgaaccttcctttggatacaacagttttgaaacactcttttgaacaattgcaggtgaatctttggagcgctttgaagcctttgttggaaatgggaatatcttcacacacaaactagccagaagcattctcagaaacttctttgtgatgtgtgagttgaacccagagagatgaacctttccttggatagagcagttttgaaacgtgtttttgtaagatctgcaagtggataattggcttcgctttgtgtcctttggtggaaacgggaatatcttctaataaaaactagacagaaatattctcagaatctcctttgtgatgtgggcattcaactaacacagttgaacatttcttttcacagagcagttttgaaacactcttttggtagaatctgccagtggatatttggagcgctttgagggctgttgtgccaatggaaatatctgcccctgaaatctagacagaagcattctcagaaactacttcgtgatgtttgcattcaactcagagagttgaacatacctcttcacagagcagttttgaaaacctctttttgtagaatctgcaagtggatattcggagcactttgaggccttcataggaaacagtaatatcttcgcataaaaactagatagaagcattgtcagaaagttctttgtgatgtgtgaattcaactcacagagttgaaccttcctttaatagagcagttttgaaacactctttttctagaatctgcaagtagatatttggagcgctttgaggccatcgttggaaaccggaatatcttcacataaaaagtagacagaggcattgtcagaaacttttttggtgatatgtagattcaactcacagcgttgaacctttctttggatggagcagttttgaaaaacccttttatcgaatctgcaggtagacattcggggtgctttgagggctgtggtgcaaaaggaaatgtcttcccatagaaactagactgaagcattctcagcaacttcttggtgacgtttgcattcatctcacagtgttgaacatacctttccatagagtggttttgaaacactgtttttgtagaatcggcaagtggatatttggactgctttcaggccttcatcggaaacgggaatatcttcacataaacaccagagagaagcatcctcagaaacttctttgtcatctgtccattcaactcacagatttgaaccttcctttttctgcagcagttttgaaacactgtttttggagaatctgcaagtggatatttggagcgatttgaggcctatggtagaaaaagaaatatctgcctctaaaaaccagacagaagcattccgagaaacttctttgtgatgtttgcattcaactagcagagttgaaccttccttttgatagggcagtttggaaacactctttttgtagaatctgcatgtggatatactggagtggtttgaggcctacggtcaaaaaggaaatatcttcctgggaaaaatagacgaaagcattctcagaaactgctttgtgatatgtgcattcgactcaccgatttgaaacttttttttgatagagcagttttgaaacactctgtagaatctgaaagtggatatttggagctctttgagggctatggcggaaaagaaaatatattcacattaaactacacagcagcattctcagaaacttctttaggatgtttgcagtaaactcacagagttgaacctacctttccatagagcagttttgaaacactctgtttgtgggatccgcaggtggatatttggaccgctttgaggcctttgctggaaatgggaatatcttcacatataaactagacagaagcattctcagaaacttcctcgtgatgtgtgcattctactcccgaatttgaatcttccttttcctgaagcagttttgaaacactctgtttgtgcaatccacaattggataattggaacgctttgatgcccatggtagaaaaggaaatatcctcatatgaaaactagacagaaggattcacagaaaatgctttgtgatgtgtgcattcaaatcacggagttgaatctttcttttgacagagcagttttgaaacactgtttctgtggaatctgccagcggacacttggagcgctttgagggctacggtggagaaggaaatatcttcccataaaaactagaaagaagtattctcagaaccatttatgtgaagcgtgcgttcaactcacagagttgaaccttccttttgatagaacagttttgaaacactcttttgaacaattgcaggtgaatatttggagggctttgaagcctttgttggaaatgggaatatcttcacacacaaactagccagaagcattctcagaaacttctttgtaatgtgtgcgttgaacccagagagatgaacctttccttcgatagagcagttttgaaacgtgtttttgtaagatcggcaagcggataattggcttcgctttgtgtcctttggtggaaacgggaatatcttctaataaaaactagacagaaatattctcagaatcttctttgtgatgtgggcattcaactaacacatttgaacatttcttttcacagagcagttttgaaacactcttttggtggaatctgccagtggatatttggagcgctttgagggcgattgtgcctatggaaatatctgcccctaaaaactagacagaagcattctcagaaactgcttcgtgatgtttgcattcaactcacagggttgaacatacctctgcatagagcagttttgaaaacctctttttgtagaatctgcaagtggatattcggaccactttgaggccttcataggaaatagtaatatcttcacataaaaattagatagaagcattgtcagaaagttctttgtgatgtgtgaattcaactcacagagttgaaccttcctttaatagagcagttttgaaacactctttttctagaatctgcaagtagatatttggagcgctttgaggccttctttggaaaccggaatatcttcacaggaaaagtagatagaggcattctcagaaacttttttgtgatatgtagattcaactcacagcgttgaacctttctttggatggagcagttttgaaaaacccttttatcgaatctgcaggtggacatttggggtgctttgagggctgtggtgcaaaaggaaatgtcttcccatagaaactagactgaagcattctcagccacttatttgtgacgtttgcattcatctcacagtgttgaacatacctttccatagagtagttttgaagcactatttttgtagaatctgcaagtggatatttggactgctttgaggccttcatcggaaacgggaataccttcacataaacactagacagaagcattctcagaaacctctttgtggtctgtccattcaactcacagagttgaaccttcctttttatggagcagtattgaaacacagtttttggagaatctgcaagtggatatttggagcgctttgaggcctatggtagaaaaagaaatatctgcctatgacaactagacagaagcattctgagaaacttctttgtgatgggtgcatgcaactacaagagttgaaccttccttttgatagggcagtttggaaacactctttttgtagaatctgcatgtggatatctggagcgatttgaggcctatggtcaaaaaggaaatattttcctgggaaaaatagacgaaagcattctcagaaactgctttgtgacatgtgcattcgactcaccgtgttgaaactgtttttcgatagagcagttttgaaacactctgtagaatctgaaagtggatatttggagctctttgagggctatggcggaaaagaaaatatattcacattaaactagacagcagcattctcagagacttctttaggatgtttgcagtaaactcacagaagttgaacatacctttccgtaaagcagttttgaaaccctctgtttgtgggatctgcaagtggatatttggaccgctttgagacctttgctggaaatgggaatatcttcacatataaactagacagaagcattctcagaaacttcttcgtgatgtgtgcattctcctcccaaatttgaatcttccttttcatgaagcagttttgaaacactccgtttgtgtaatctacaattggataactggaaggctttgatgcccatggtagaaaaggaaataacctcatataaaaactagacagaaggattcacagaaaatgctttgtgatgtgtgcattcaaatcacggagttgaatctttcttttgttagagcagttttgaaacactgtttctgtggaatctgccagcggacacttggagcgctttgagggctatggtggagaaggaaataacttcccataaaaactagaaagaagcattctcagaaccatttatgtgaagcgtgcattcaactcacagagttgaaccttccttttgatagaacagttttgaaacactcttttgaacaattgcaggtgaatatttggagggctttgaagcctttgttggaaacgggaatatcttcacacacgaactagccagaagcattcccagaaacttctttgtgatgtgtgcgttgaacccagagagatgaacctttctttgatagagcagttttgaaacgtgtttttgtaagatcggcaagcggataattggcttcgctttgtgtcctttggtggaaacgggaatatcttctaataaaaactagacagaaatattctcagaatctcctttgtgatgtgggcattcaactaacacagttgaacatttcttttgacacagcagttttgaaacacacttttggtagaatctgccagtggatatttggagcgcttggagggctattgtgccaatggaaatatctgcccctgaaatctggacagaagcattctcagaaactgcttcgtgatgtttgcattcaactcacagagttgaacatacgtgtgcatagagcagttttgaaaacctctttttgtagaatctgcaagtggatattcggaccactttgaggccttcataggaaacagtaatatcttcacataaaaactagatagaagcattctcagaaagttctttgtgatgtgtaaattcaactcacagagttgaaccttcgtttaatagagcagttttgaaacactctttttctagaatctgcaagtagatatttggagcgctttgaggccttcgttggaaaccggaatatcttcacacaaaaagtagatagaggcatgctcagaaacttttttgtcatatgtagattcaactcacagcgttgaacctttcttttgatagagcagttttgaaaaactcttttatcgaatctgcaagtagacatttggagtgctttgagggcttctggtgcaaaaggaaatgtcttcccatagaaactagactgaaagcattctcagcaacttcttggtgacgtttgcattcatctcacagttttgaacatacctttccatagagtggttttgaaacactgtttttgtataatcggcaagtggatatttggactgctttcaggccttcatcggaaacgggaatatcttcacataaacactagagagaagcattctcagaaacttctttgtggtctgtccattcaactcacagagttgaaccttcctttttatggagcagttttgaaaccctgtttttggagaatctgcaagtggatatttggagcgctttgaggcctatggtagaaaaagaaatatctgcctatgacaactagacagaagcattctgagaaacttctttgtgatgtttgccttcaactaccggagttgaaccttccttttgatagggcagtttggaaacactctttttgtagaatctgcatgtggatatctggagcgatttgaggcctacggtccaaaaggaaatatcttcctgggaaagatagacgaaagcattctcagcaactgctttgtgatatgtgcattcgactcaccgagttgaaacttttttttgatagagcagttttgaaacactctgtagaatctgaaagtggatatttggagatctttgagggctatggcggaaaagaaagtatattcacattaaagtagacagcagcattccaagaaacttccttaggatgtttgcagtaaactcacagagttgagcattcctttccgtagagcagttttgaaacactctgtttgtgggatccgcaagtggacatttggaccgctttgagacctttgctggaaatgggaatatcttcacatataaactggacagaagcattctcagaaacttcttcatgatgtgtgcattctcctcgcgaatttgaatcttccttttcatgaagcagttttgaaacactctgtttgtgcaatccacaattggataattggaacgctttgatgcccatggtagaaaaggaaatatcctcatataaaaactagacagaaggattcacagaaaatgctttgtgatgtgtgcattcaaatcacggagttcaatctttcttttgttagagcagttttgaaacactgtttctgtggaatctgccatcggacacttggagcgctttgagggctgtggtggagaaggaaatatcttcccataaaaactagaaagaagcattctcataaacatttatgtgaagcgtgcattcaactcacagagttgaaccttcgttttgatagaacagtttggaaacactcttttgaacaattgcaggtgaatctttggagcgctttgaagcctttgttggaaatgggaatatcttcacacacaaactagccagaagcattctcagaaagttctttgtgatgtgtgcgttgaacccagagagatgaacctttccttggatagagcagttttgaaacgtgtttttgtaagatctgcaagtggataattggcttcgctttgtgtcctttggtggaaacgggaatatcttctaataaaaactagacagaaatattctcagaatctcctttgtgatgtgggcattcaactaacacagttgaacatttcttttcacagagcagttttgaaacactcttttgggagaatctgccagtggatatttggagcgcttggagggctattgtgccaatggaaatatctgcccctgaaaactagacagaagctttctcagaaactacatagtgatgttcgcattcgactcacagagttgaacatacctcttcatagagcagtttttaaaaccttttttgtagaacctgaaagtggatattcggaccactttgaagccttcataggaaacagtaatatcttcacataaaacctagatagaagcattgtcagaaacttctttgtgatgtgtgaattcaactcacagagttgaaccttcctttaatagagcagttgtgaaacactctttttctagaatctgcaagtagatatttggagcgctttgaggccttcgttggaaaccggaatatcttcacaggaaaagtagatagaggcattctcagaaacttgttttgtgatatgtagattcaactcacagcgttgaacctttctttggatggagcagttttgaaaacctcttttatcgaatctgcaggtaaacatttggggtgctttgagggctgcggtgcaaaaggaaatgtcttcccatagaaactagactgaagcattctcagcaacttcttcgtgaggtttgcattcatttcacagtgttgagcatacctttccacagagtagttttgaaacactatttttgtagaatttgcaactggatatttggactgctttgaggccttcatcggaaacgggaatatcttcacataaacactagacagaagcattctcagaaacttctttgtgatctgtccattcaactcacagagttgaaccttcctttttatggagcagctttgaaacactgtttttggagaatctgcaagtggatattcggagcggtttgaggcctatggtagaaaaagaaacatctgcctctaaaaactagactgaagcattctgagaaacttctttgtgatgtttgcattcaactaccagagttgaaccttccttttgattgcgcagtttggaaacactctttttgtagaatctgcatgtggatatctggagcgatttgaggcctacggtcaaaaaggaaatatcttcctgggaaaaatagacgaaatcattctcagaaactactttgtgttatgagcattcaactcacagagttgaaccttttttttgatagagcagttttgaaacactctgtagaatctgaaagtggatatttggagctctttgagggctatggtggaaaagaaaatatattcacattaaactagacagcagcattctcagtaacttctttaggatgtttgcagtaaactcacagagttgaacataactttccgtagagcagttttgaaacactctgtttgtgggatccgcaaggggatatttggaccgctttgagacctttgctggaaatgggaatatcttcacatataaactagacagaagcattctcagaaacttcttcgtgatgtgtgcattctactcccaaatttgaaacttccttttcatgaagcagttttgaaacactctatttgtgcattctacaattggatgattggaacgctttgatgcccatggtagaaaaggaaatatcctcatataaaaactagacagaaggattcacaaaaaatgctttgtgatgtgtgcattcaaatcacggagttgaatctttcttttgttagagcagttttgaaacactgtttctgtggaatctgccagcggacacttggagcgctttgagggctgtggtggagaaggaaatatcttcccataaaaactagaaagaagcattctcagaaacatttatgtgaagcgtgctttcaactcacagagttgaaccttccttttgatacaacagttttgaaacacccttttgaacaattgcaggtgaatctttggagcgctttgaagcctttgttggaaatgggaatatcttcacacacaaactagccagaagcattctcagaaacttctttgtgatgtgtgcgttgaacccagagagatgaacctttccttggatagagcacttttgaaacgtgtttttgtaagatctgcaagcggataattggcttcgctttgtgtcctttggtggaaacgggaatatcttctaataaaaactagacagaaatattctcagaatctcctttgtgatgtgggcattcaactaacacagttgaacatttcttttcacagagcagttttgagacactcttttggtagaatctgccagtggatatttggagcgctttgagggctgttgtgccaatggaaatatctgcccctaaaatctagacagaagcattctcagaaactacttcgtgatgtttgcattcaacacacagagttgaacatacctcttcacagagcagttttgaaaacctctttctgtagaatctgcaagtgatattcggaccactttgaggccttcataggaaacagtaatatcttcacataaaaactagatagaagcattgtcagaaagttctttgtgatgtgtgaattgaaatcacagagttgaaccttcctttaatagagcagttttgaaacactctttttctagaatctgcaagtagatatttggagagctttgaggccttcgttggaaaccggaatatcttcacataaaaagtagatagaggcattctcagaaacttttttgtgatatgtagattcaactcacagcgttgaacctttctttggatggagcagttttgaaaaactcttttatcgaatctgcaggtagacatttggggtgctttgagggctgtggcgcaaagggaaatgtcttcccatagaaactagactgaagcattctcagcaacttctttgtgacgtttgcattcatctcacagtgttgaacatacctttccatagagtagttttgaaacactgtttttgtagaatcggccagtggatatttggactgctttgaggccttcatcggaaacgggaatatcttcacataaacactagagagaagcattctcagaaacttctttgtcatctgtccattcaactcacagagttgaaccttcctttttatggagcagttttgaaacactccttttggagaatctgcaagtggatatttggagcgctttgaggcctatggtagaaaaaggaatatctgcctctgaaaaccagacagaagcattccgagaaacttctttgtgatgtttgcattcaactagcagaggtgaaccttccttttgatagggcagtttggaaacactctttttgtagaatctgcatgtggatatcttgagcggtttgaggcctacggtcaaaaaggaaatatcttcctgggaaaaatagacgaaagcattctcagaaagggctttgtgatatgcgcattcgactcaccgagttgaaacttttttttgatacagcagttttgaaacactctgtagaacctgaaagtggatatttggaactctttgagggctatgacggaaaagaaaatatattcacattaaagtagacagcagcattctcagaaacttctttaggatgtttgcagtaaactcacagagttgaacatacctttccgaagagcagttttgaaacactctgtttgtgggatccgcaagtggatatttggaccgctttgagacctttgctggaaatgggaatatcttcacatataaactagacagaagcattctcaaaaacttcttcgtgatgtgtgcattctactcccaaatttgaatcttccttttcatgaagcagttttgaaacactctatttctgcaatctacaattggataattggaacgctttgatgcccaaggtagaaaaggaaatatcctcatataaaaacttgacagaaggattcacagaaaatgctttgtgatgtgtgcattcaaatcacggggttgaatctttcttttgttagagccgttttgaaacactgtttctgtggaatctgccagcggacacttggagcgctttgagggccatggtggagaaggaaatatctttccataaaaactaaaaagaagcattctcagaaacatttatgtgaagcgtgtattcaactcacagagttgaaccttccttttgatagaacagttttgaaacactcttttgaacaattgcaggtgaatctttggagcgctttgaagcctttgttggaaatgggaatatcttcacacacaaactagccagaagcattctgagaaacttctttgtgatgtgtgcgttgaacccagagagatgaacgtttcctttgatagagcagttttgaaacgtgtttttttaagatctgcaagcggataattggcttcgctttgtgtcctttggtggaaacgggaatatcttctaataaaaactagacagaaatattctcagaatctcctttgtgatgtgggcatttaactaacacagttgaacatttcttttcacagagcagttttgagacactcttttggtagaatctgccagtggatatttggagcgctttgagggctgttgtgccaatggaaatatctgcccctaaaatctagacagaagcattctcagaaactacttcgtgatgtttgcattcaacacacagagttgaacatacctcttcacagagcagttttgaaaacctctttctgtagaatctgcaagtggatattcggaccactttgaggtcatcataggaaacagtaatatcttcacataaaaactagatagaagcattgtcagaaagtactttgtgatgtgtgaattcaactcacagagttgaaccttcctttaatagagcagttgtgaaacactctttttctagaatctgcaagtagatatttggagcgctttgaggccttcgttggaaaccggaatatcttcacaggaaaattagatagaggcattctcagaaacttttttgtgatatgtagattcaactcacagtgttgaacctttctttggatggagcagttttgaaaaactcttttatcgaatctgcaggtagacatttggggtgctttgagggctctggtgcaaaaggaaaagtcttcccatagaaactagactgaagcattctcagcaacttcttggtgacgtttgcattcatctcacagtgttgaacatacctctccatagagtggttttgaaacactgtttttgtagtatcggcaagtggatatttggactgctttgaggccttcatcggaaacgggaatatcttcacataaacactagagagaagcattctcagaaacttctttgtcatctgtccattcaactcacagagttgaaccttcctttttatggagcagatttgaaacactccttttggagaatctgcaagtggatatttggagcgctttgaggcctatggtagaaaaagaaatatctgcttctaaaaaccagacagaagcattccgagaaacttctctgtgatgtttgcattcaagtagcagagttgaaccttccttttgatagggcagtttggaaacactctttttgtagaatctgcatgtggatatctggagcggtttgaggcctacggtcaaaaaggaaatatcttcctgggaaaaatagacgaaagcattctcagaaagggctttgtgatatgcgcattcgactcaccgagttgaaacttttttttgatacagcagttttgtaacactctgtagaatctgaaagtggatatttggagctctttgagggctatggcggaaaagaaaatatattcacattaaagttgacagcagcattctcagaaacttctttaggatgtttgcagtaaactcaaggaattgaacatacctttccgtagagcagttttgaaacactctgtttgtgggatccgcaagtggatatttggacagctttgagacctttgctggaaatgggaaaatcttcacatataaactagacagaagcattctcagaaacttcttcgtgatgtgtgcattctcctcccgaatttgaatcttccttttcctgaagcagttttgaaacactctgtttgtgcaatccacaattggataattggaacgctttgatgcccatggtagaaaaggaaatatcctcatataaaaactagacagaaggattcacagaaaatgctttgtgatgtgtgcattcaaatcacggaggtgaatctttgttttgttagagcagttttgaaacactgtttctgtggaatctgccagcggacacttggagcgctttgagggctatggtggagaaggaaatgtcttcacataaaaactagaaagaagcattctcagaaacatgtatgtgaagcgtgcattcaactcacagagttgaaccttccttttgatacaacagttttgaaacactcttttgaacaattgcaggtgaatctttggagcgctttgaagcctttgttggaaatgggaatatcttcacacacaaactagccagaagcattctcagaaacttctttgtgatgtgtgcgttgaacccagagagatgaacctttcctttgatagagcagttttgaaacgtgtttttgtaagatctgcaaggggataatgggcttcgctttgtgtcctttggtggaaacgggaatatcttctaataaaaactagacagaaaatattctcagtatctcctttgtgatgtgggcattcaactaacacagttgaacatttcttttcacagagcagttttgaaacactcttttggtagaatctgccagtggatatttggagcgcttggagggctattgtgccaatggaaatatctgcccctgaaaactagacagaagcattctcagaaactacttcgtcatgtctgcattcaacacacagagttgaacatacctcttcacagagcagttttgaaaacctctttctgtagaatctgcaagtggatattcggaccactttgaggccttcataggaaacagtaatatcttcacataaaaactagatagaggcattctcagaaagttttttgtgatatgtagattcaactcacagcattgaacctttctttggatggagcagttttgaaaaacccttttatcgaatctgcaggtagacatttggggtgctttgagggctgtggtgcaaaaggaaatgtcttcccatagaaactagactgaaagcattctcagcaacttctttgtgacgtttgcattcatctcacagtgttgaacatacctttccatagagtagttttgagacactatttttgtagaatctgcaagtggatatttggactgctttgaggccttcatcggagacgggaatatcttcacataaacactaggcagaagcattctcagaaactactttgtgatctgtccattcaactcacagagttgaaccttcctttttatggagcagttttgaaacactgtttttggagaatctgcaagtggatatttggagcgctttgaggcttatggtagaaaaagaaatatctgcctctaaaaactagacagaagcattctgagaaacttctttgtgatgtttgcattcaactaccagagttgaatcttccttttgatagggcagtttggaaacactctttttgtagaatctgcatgtggatatctggagcgatttgaggcctatggtcaaaaaggaaatatcttgcctgggaaaaatagacgaaagcattctcagaaactgcttcgtgatatgtgcattcgactcaccgagttgaaacttttttttgatagagcagttttgaaacaccctgtagaatctgaaagtggatatttggagctctttgagggctatggcggaaaagaaaagatattcacattaagctagacagcagcattctcagaaacctctttaggatgtttgcagtaaactcacagagttgaacatacctttccttagagcagttttgaaacactctgtttgtgggatccgcaagtggatatttggaccgctttgagacctttgctggaaatgggaatatcttcacatataaactagacagaagcattctcagaaacttcttcgtgatgtgtgcattctcctcccgaatttgaatcttccttttcatgaagcagttttgaaacactctgtttgtgcaatccacaattggataattggaacgctttgatgcccatggtagaaaaggaaatatcctcatataaaaattagacagaaggattcacagaaaatgctttgtgatgtgtgcattcagatcacggagttgaatctttcttttgttagagcagttttgaaacaccgtttctgtggaatctgccagcggacacttggagcgctttgagggctatggtggagaaggaaatatcttcacataaaaactagaaagaagcattctcagaaacatttatgtgaagcgtgcattcaactcacagagttgaaccttcgttttgatagaacagttttgaaacactcttttgaacaattacaggtgaatctttggagcgctttgaagcctttgttggaaatgggaatatcttcacacacaaactagccagaagcattctcagaaacttctttgtgatgtgtgcgttgaacccagagagatgaacctttccttggatagagcagttttgaaacgtgtttttgtaagatctgcaagcggataattggcttcgctttgtgtcctttggtggaaacaggaatatcttctaataaaagctagacagaaatattctcagaatctcctttgtgatgtgggcattcaactaacacaattgaacatttcttttcacagagcagttttgaaacacagttttggtagaatctgccagtggatatttggagcacttggagggctactgtgccaatggaaatatctgcccctgaaaattagacagaagcattctcagaaactacattctgatgtttgcattcgactcacagagttgaacatacctcttcatagagccgttttgaaaaccttttttgtagaatctgaaagtggatattcggaccactttgaggccttcataggaaacagtaatatcttcacataaaaactagatagaagcattgtcagaaagttcttggtgatgtgtgaattcaactcacagagttgaaccttcctttaatagagcagttttgaaacactctttttctagaatctgcaagtagatacttggagcgctttgaggccttcgttggaaaccggaatatcttcacaggaaaagtagatagaggcattctcagaaacttttttgtgatatgtagattcaactcacagcgttgaacctttcttttgatagagcagttttgaaaaactcttttatcgaatctgcaagtagacatttggagtgctttgagggctgtggtgcaaaaggaaatgtcttcccatagaaactagactgaagcattctcagcaacttctttgtgacgtttgcattcatctcacagggttgaacatacctttgcatagagtagttttgaaacactgtttttgtagaatctgcaagtggatatttggactgctttgaggccttcatcggaaacgggaatatcttcacataaacactagacagaagcattctcagaaacttctttgtgatctgtccattcaactcacagagttgaaccttcctttttatggagcagttttgaatcactgtttttggagaatctgcaagtggatatttcgagcgctttgaggcctatggtagaaaaagaaatatctgcctctaaaaaccagacagaagcattccgagaaacttctctgtgatgtttgcattgaactagcagagttgaaccttccttttgatagggcagtttggaaacactctttttgtagaatctgcatgtggatatctggagcggtttgaggcctacggtcaaaaaggaaatatcttcctgggaaaaatagacgaaatcattctcagaaactactttgtgttatgtgcattcaactcacagagttgaaccttttttttgatagagcagttttgaaacactctgtagaatctgaaagtggatatttggagctctttgagggctatggtggaaaagaaaatatattcacattaaactagacagaagcattctcagtaacttctttaggatgtttgcagtaaactcacagagttgaacatacctttccgtagagcagttttgaaacactctgtttgtgggatccgcaaggggatatttggaccgctttgagacctttgctggaaatgggaatatcttcacatataaactagacagaagcattctcagaaacttcttcgtgatgtgtgcattctcctcccaaatttgaatcttccttttcatgaagcagttttgaaacactctgtttgtgcaatccacaattggataattggaacgctttgatgcccatggtagaaaaggaaatatcctcatataaaaactagacagaaggattcacagaaaatgctttgtgatgtgtgcattcaaatcatggagttgaatctttcttttgtcagagcagttttgaaacactgtttctgtggaatctgccagcgaacacttggagcgctttgagggctatggtggagaaggaaatatcttcccataaaaactagaaagaagcattctcagaaacatttatgtgaagcatgcattcaactcacagagttgaaccttccttttgatagaacagttttgaaacactcttttgaacaattgcaggtgaatctttggagcgctttgaagcctttgttggaaatgggaatatcttcacacacaaactagccagaagcattctcagaaacttctttgtgatgtgtgcgttgaacccagcagagatgaacctttccttggatagagcagttttgaaacgtgtttttgtaagatctgcaagcggataattggcttcgctttgtgtcctttggtggaaacgggaatatcttctaataaaaactagacagaaatattctcagaatcttctttgtgatgtgggcattcaactaacacagttgaacatttcttttcacagagcagttttgaaacactcttttggtagaatctgccagtggatatttggagcgctttgaagactattgtgccaatggaaatatctgcccctaaaaactagacagaagcattctcagaaactacttcgtgatgtttgcattcaacacacagagttgaacatacctcttcacagagcagttttgaaaacctctttctgtagaatctgcaagtggatattcggaccactttgaggccttcataggaaacagtaatatcttcacataaaaactacatagaagcattgtcagaaagttctttgtgatgtgtgaattcaactcacagagttgaaccttcctttaatagagcagttttgaaacactctttttctagaatctgcaagtagatatttggagcgctttgaggccttcgatggaaaccggaatatcttcacaggaaaagtagatagaggcattctcacgaaacttttttgtgatatgtagattcaactcacagcgttgaacctttctttggatggagcagttttgaaaaactcttttatcgaatctgcaggtagacatttggggtgctttgagggctgtggtgcaaaaggaaatgtcttccaatagaaactagactgaagcattctcagcaacttctttgtgacgtttgcattcatctcacagtgttgaacatacctttccatcgagtacttttgaaacactgtttttgtagaatctgcaagtggatatttggactgctttgaggccttcatcggaaacgggaatatcttcacataaacactagagagaagcattctcagaaacttctttgtggtctgtccattcaactcacagtgttgaaccttcctttttatggagcagttttgaaaccctgtttttggagaatctgcaagtggatatttggagcgctttgaggcctatggtagaaaaagaaatatctgcctatgacaactagacagaagcattctgagaaacttctttgtgatgtttgcattcaactagcagagttgaaccttccttttgatagggcagtttggaaacactctttttgtagaatctgcatgtggatatctggagcggtttgaggcctacggtcaaaaaggaaatatcttcctgggaaaaatagacgaaagcattctcagaaagtgctttgtgatatgtgcattcgactcaccgagttgaaacttttttttgatagagcagttttgaaacactctgtagaatctgaaagtggatatttggagctctttgagggctatggcagaaaagaaaatatattcacattaaagtagacagcagcattctcagaaacttctttaggatgtttgcagtaaactcacagagttgaacatacctttccaaagagcagttttgaaacactctgtttgtgggatccgcaagtggatatttgggccgctttgagacctttgctggaaatgggaatatcttcacatataaactacacagaagcattctcagaaacttcttcgtgatgtgtgcattctactcccaaatttgaatcttccttctcatgaagcagttttgaaacactctgtttgtgcaatctacaattggataattggaacgctttgatgcccatggtagaaaaggaaatatcctcatataaaaactagacagaaggattcacagaaaatgctttgtgatgtgtgcattcaaatcacggtgttgaatcttattttgttagagcagttttgaaacactgtttctgtggaatctgcccgcggacacttggagcgctttgagggctgtggtggagaagggaatatcttcccataaaaactagaaagaagcattctcagaaacatttatgtgaagcgtgcattcaactcacagagttgaaccttccttttgatacaacagttttgaaacactctttggaacaattgcaggtgaatctttggagcgctttgaagcctttgttggaaatgggaatatcttcacacacaaactagccagaagcattctcagaaaattctttgtgatgtgtgcgttgaacccagagagatgaacctttcctttgatagagcagttttgaagcgtgtttttgtaagatcggcaagcggataattggcttcgctttgtgtcctttggtggaaacgggaatatcttctaataaaaactagacagaaatattctcagaatcttctttgtgatgtgggcattcaactaacacagttgaacctttcttttcacagagcagttttgaaacaaccttttggtagaatctgccagtggatatttggagcgctttgagggctattgtgccaacggaaatatctgcccctaaaaactagacagaagcattctctgaaactactttgtgatgtttgcattcaactcacagagttgaacatacctcttcatagagcagttttgaaaacctctttttgtagaatctgcaagtggatattcggaccactttgaggccttcataggaaacagtaataccttcacataaaaactagatagaagcatagtcagaaagttctttgtgatgtgtgaattcaaatcacagagttgaaccttcctttaatagagcagttttgaaacactctttttctagaatctgcaagtagatatttggagcgctttgaggccttcgttggaaaccggaatatcctcacataaaaagcagatagaggcattctcagaaactttttcgtgatatgtggattcaactcacagcgttgaacctttcttttgatagagcagttttgtaaaactcttttatcgaatctgcaagtagacatttggagtgctttgagggttgtggtgcaaaaggaaatgtcttcccataggaactagactgaagcattctcagcaacttcttggtgacgtttgcattcatctcacagtgttgaacatacctttccatagagtggttttgaaacactgtttctgtagaatcggcaagtggatatttggactgctttgaggccttcatcggaaatgggaatatcttcacataaacactagagagaagcattctcagaaacttctttgtgatctgtccattcaactcacagagttgaaccttcctttttatggagcagttttgaaacactctttttggagaatctgcaagtggatatttggagcgctttgaggcctatggtagaaaaagaaatatctgcctctaaaaaccagacagaagcattccgagaaacttctctgtgatgtttgcattcaactagcagagttgaaccttccttttgatagggcagtttggaaacactcttttgtagaatctgcatgtggatatctggagcggtttgaggcctacggtcaaaaaggcaatatcttcctgggaaaaatagacgaaagcattctcagaaactgctttgtgatatgtgcattccagtcaccgagttgaaacttttttttgatagagcagttttgaaacactctgtagaatctgaaagtggatatttggatctctttgagggctatggcggaaaagaaaatatattcacattaaagtagacagcagcattcccagaaacttctttaggatgtttgcagtaaactcacagagttgaacatacctttccgtagagcagttttgaaacactctgtttgtgggatccgcaagtggatatttggaccgctttgagacctttgctggaaacgggaatatcttcacatatcaactagacagaagcattctcagaaacttcttcgtgatgtgtgcattctactcccgaatttgaatcttccttttcatgaagcagttttgaaacactctgtttgtgcaatccacaagtggataattggaacgctttgatgcccatggtagaaaaggaaatatcctcatataaaaattagacagaaggattcacagaaaatgctttgtgatgtgtgcattcgaatcacggagttgaatctttcttttgttagagcagttttgaaacacagtttctgtggaatctgccagcggacacttggagcgctttgaggtctatggtggagaaggaaatatcttcccataaaaactagaaagaagcattctcagaaccatttatgtgaagcgtgcattcaactcacagagttgaaccttccttttgatagaacagttttgaaacactcttttgaacaattgcaggtgaatatttggagggctttgaagcctttgttggaaacgggaatattcttcacacacgaactagccagaagcattctcagaaacttctttgtgatgtgtgcgttgaacccagagagatgaacctttcctttgatagagcagttttgaaacgtgtttttgtaagatctgcaagcggataattggcttcgcattgtgtcctttggtggaaacgggaatatcttctaataaaaactagacagagatattctcagaaacttctttgtgatgtgggcattcaactaacacagttgaacatttcttttcacagagcagttttgaaacactcttttggtcgaatctgccagtggatatttggagcgctttgagggctattgtgccaatggaaatatctgcccctaaaaactagacagaagcattctcagaaactacttcgtgatgtttgcattcaacacacagagttgaacatacctcttcacagagcagttttgaaaacctctttctgtagaatctgcaagtggatatttggaccactttgaggccttcttaggaaacagtaatatcttcacataaaaactagatagaagcattgtcagaaagttctttgtgatgtgtgaattcaactcacagaattgaaccttcctttaatagagcagttttgaaacactctttttctagaatctgccagtagatatttggagcgctttgaggccttcgttggaaaccggaatatcttcacataaaacgtagatagaggcattctcagaaactttttcgtgatatgtggattcaactcacagcgttgaacctttcttttgatagagcagttttgtaaaactcttttatcgaatctgcaagtagacatttagagtgctttgagggctgtggtgcaaaaggaaatgtcttcccatagaaactagactgaagcattctcagcaacttctttgtgacgtttgcattcatctcacagtgttgaacatacctttccatacagtagttttgaagcactatttttgtagaatctccaagtggatatttggactgctttgaggccttcatcggaaacgggaatatcttcacataaacactagacagaagcattctcagaaacttctttgtgatctgtccattcaactcacagagttgaaccttcctttttatggagcagttttgaaacactgtttttggagaatcttcaagtagatatttggagcgctttgtggcctatggtagaaaaagaaatatctgcctataacaactagacagaggcattctcagaaacttctttgtgatgtttgcattcaactcacagagttgaacatacctcttcatagagcagttttgaaaacctctttttgtagaatctgcaagtggatatttggaccactttgaggccttcatagaaaacagtaatatcttcacataaaaactagatggaagcattctcagaaactgctttgtgatatgtgcattcgactcaccgagttgaaactttttttggatagagcacttttgaaacactctgtagaatctgaaagtggatatttggagctctttgagggctatggcggaaaagaaaagatattcacattaaactagacagcagcattcccagaaacttctttaggatgtttgcagtaaactcacagagttgaacatacctttccgtagagcagttttgaaacactctgtttgtgggatccgcaagtggatatttggacccctttgagacctttgctggaaacgggaatatcttcacacataaactagacagaagcattctcagaaacttcttcgtgatttgtgcattgtactcccaaatttgaatcttccttcccaaggagcagttttgaaacactctgtttgtgcaatctacaattggagaattggaacgcttggatgcccgtggtagaaaaggaaatatcctcatataaaaactagacagaaggattcacagaaaatgctttgtgatgtgtgcattcagatcacggagttgaatctttcttttgttagagcagttttgaaacactgtttctgtggaatctgtcagcagacacttggagtgctttgagggctatggtggagaaggaaatatcttcacataaaaactagaaagaagcattctcagaaacatttatgtgaagcttgcattcaactcacagagttgaaccttccctttgatacaacagttttgaaacacccttttgaacaattgcaggtgaatctttggagcgctttgaagcctttgttggaaatgggaatatcttcacacacaaactagccagaagcattctcagaaacttctcgtgatgtgtgcgttgaacccagagagatgaacctttcctatgatagagcagttttgaaacgtgtttttgtaagatctgcaagcggataattggcttcgctttgtgtcctttggtggaaacgggaatatcttctaataaaaactagacagagatattctcagaaacttctttgtgatgtgggcattcaactaacacagttgaacattgcttttcacagagcagttttgaaacactcttttggtcgaatctgccagtggatatttggagcgctttgagggctattgtgccaatggaaatatctgcccctaaaaactagacagaagcattctcagaaactgctttgtgatgtttgcattcaactcacagagttgaacatacctcttcatagagcagttttgaaaacctctttttgtagaatctgcaagtggatatttggaccactttgaggccttcatagatacagtaatatcttcacataaaaactagatggaagcattgtcagaaagttctttgtgatgtgtgaattcaactcacagagttgaaccttcctttaatagagcagttttgaaacactctttttctagaatctgccagtagatatttggagcgctttgaggccttcgttggaaaccggaatatcttcacataaaacgtagatagaggcattctcagaaactttttttgtgatatgtagattcaactcacagcgttgaacctttctttggatggagcagttttgaaaaacccttttatcgaatctgcaggtagacattcggggtgctttgagggctgtggtgcaaaaggaaatgtcttcccatagaaactagactgaagcattctcagcaacttctttgtgacgtttgcattcatctcacagtgttgaacatacctttccatagagtagttttgaagcactatttttgtagaatctgcaagtggatatttggactgctttcaggccttcatcggaaacgggaatatcttcacataaacactagacagaagcattctcagaaacttctttgtggtctgtccattcaactcacagagttgaaccttcctttttatggagcagttttgaaaccctgtttttggagaatctgcaagtggatatttggagtgctttgaggcctatggtagaaaaagaaatatctgcctatgacagctagacagaagcattccgagaaacttctttgtgatgtttgcattcaactagcagagttgaaccttccttttgatagggcagtttggaaacactctttttgtagaatctgcatgtggatatctggagcggtttgaggcctacgttcaaaaaggaaatatcttcctgggaaaaatagacgaaagcattctcagaaagtgctttgtgatatgtgcattcgactcaccgagctgaaacttttttttgatagagcagttttgaaacactctgtagaatctgaaagtggatatttggagctctttgagggctatggcggaaaagaaaatatattcacattaaaaaagtagacagcagcattctcagaaacttctttaggatgtttgcagtaaactcacagagttgaacatacctttccgtagagcagttttgaaacactctgtttgtgggatccgcaagtggatatttggaccgctttgagacctttgctggaaatgggaataacttcacatataaactagacagaagcattctcagaaacttcttcgtgatgtgtgcattctactcccaaatttgaatcttccttttcatgaagcagttttgaaacactctgtttctgccatctacaattggataattggaacgctttgatgcccaaggtagaaaaggaaatatcctcatatagaaactagacagaaggattcacagaaaatgctttgtgatgtgtgcattcaaatcaccggagttgaatctttcttttgttagagcagttttgaaacactgtttctgtggaatctgccagcggacacttggagcgctttgagggctgtggtggagaaggaaatatcttcccataaaaactagaaagaagcattctcagaaacatttatgtgaagcgtgcattcaactcacagagttgaaccttccttttgatacaacagttttgaaacactcttttgtacaattgcatgtgaatctttggagcgctttgaagcctttgttggaaatgggaatatcttcacacacaaactagccagaagcattctcagaaacttctttgtgatgtgtgcgttgaacccagagagatgaacctttcctttgatagagcagttttcaaacgtgtttttgtaagatcggcaagcggataattggcttcgctttgtgtcctttggtggaaacgggaatatcttctaataaaaactagacagaaatattctcagaatctcctttgtgatgtgggcattcaactaacacagttgaacatttcttttcacagagcagttttgaaacactcttttggtagaatctgccagtggatatttggagcgatttgagggctattgtgccaatggaaatttctgcccctgaaaactagacagaagcattctcagaaactgctttgtgatgtttgcattcaactaccagagttgaacttccctcttcatagagcagttttgaaatcctctttttgtagaatctgcaagtggatatttggaccactttgaggccttcagagtaaatagtaatatcttcacataaaaactagatagaagcattctcagaaacttctttgtgatgtgtgaattcaactcacagagttgaaccttcctttaatagtgcagttttcaaacactctttttgtagaatctgcaagtagatatttggagcactttgaggccttcattggaaactggaatatcttcacataaatagtagatagaggcattctcagaaacttttttgttatatgtagattcaactcacagtgttgaagctttcttttgattgaacagttttgaagaactcttttatcgaatctgcaagtagacatttggagttctttgagggctgtagtcgaaaaggaaatatcatcacatagaaactagactgaagcattctcagcaacttcttggtgacgtttgcattcatctcacagtgttgaacatacctttccatagagtggttttgaaacactgtttttgtagaatcggcaagtggatatttggactgctttgaggccttcatcggaaacgggaatatacttcacataaacactagagagaagcattctcagaaacttctttgtcatctgtccattcaactcacagagttgaaccttcctttttctggagcagttttgaaacactccttttggagaatctgcaagtggatatttggagcgctttgaggcctatggtagaaaaagaaatatctgcctctaaaaaccagacagaagcattccaagtaaacttctctgtgttgtttgcattcaactagcagagttgaaccttccttttgatagggcagtttggaaacactctttttgtagaatctgcatgtggatatctggagcggtttgaggcctacggtcaaaaaggaaatatcttcctgggataaatagacgaaagcattctcagaaactgctttgtgatatgggcattcgactcaccgagttgaaacttttttttgatagagcagttttgaaacactctatagaatctgaaagtggatatttggagctctttgagggctatggcggaaaagaaaatatattcacattaaagtagacagcagcactcccagaaacttctttaggatgtttacagtaaactcacagagttgaacatacctttctgtagagcagttttgaaacactctgtttgcgggatccgcaagtggatatttggaccgctttgagacctttgctggaaatgggaatatcttcacatatgaactagacagaagcattctcagaaacttcttcgtgatgtgtgcattctactcccaaatttgaatcttccttttcatgaagcagttttgaaacactctgtttgtgcaatccacaattggataattggaaagctttgatgcccatggtagaaaaggaaatatcctcatataaaaactagacagaaggattcacagaaaattctttgtgatgtgtgcattcaaatcacggagttgaatctttcttttgttagagcagttttgaaacactgtttctgtggaatctgccagcggacacttggagcgctttgagggctatggtggagaaggaaatatcttcacataaaaactagaaagaaatattctcagaatcttctttgtgatgtgggcattcaactaacacagttgaacatttcttttcacagaacagttttgaaacactcttttgaacaattgcaggtgaatctttggaacgctttgaagcctttgttggaaataggaatatattcacacacaaactagccagaagcattctcagaaatttctttgtgatgtgtgcgttgaacccagagagatgaacctttccttcgatagagcagttttgaaacgtgtttttgtaagatcggcaagcggataattggcttcgctttgtgtcctttggtggaaacgggaatatcttctaataaaaactagacagaaatattctcagaatctcctttgtgatgtgggcattcaactaacacagttgaacatttcttttcacagagcagctttgaaacactctttggtagaatctgccggtggatatttggagcgcttggagggctattgtgccagtggagatatctgcccctgaaaactagacagaagcattctcagaaactacttcgtgatgtttgcattcaacacacagagttgaacatacctcttcacagagcagttttgaaaacctctttctgtagaatctgcaagtggatattcggaccactttgaggacttcataggaaacagtaatatcttcacataaaaactagatagaagcattgtcagaaagttctttgtgatgtgtgaattcaactcacagagttgaaccttcctttaatagagcagttttgaaacactttttttctggaatctgcaagtagatatttggagcgctttgaggccttcgttggaaaccggagtatcttcacaggaaaagtagatagaggcatgctcagaaacttttttgtcatatgtagattcaactcacagcgttgaacctttcttttgatagagcagttttgaaaaactcttttatcgaatctgcaagtagacatttggagtgctttgacggctctggtgcaaaaggaaatgtcttcccatagaaagtagactgaagcattctcagcaacttcttggtgacgtttgcattcatctcacagtgttgaacatacctttccatagagtggttttgaaacactgtttttgtagaatcggcaactggatatttggactgctttgaggccttcatcggaaacgggaatatcttcacataaacactagagagaagcattctcagaaacttctttgtcatctgtccattcaactcacagagttgaaccttcctttttatagagcagttttgaaacactccttttggagaatccgcaagtggatatttggagcgctttgaggcctatggtagaaaaagaaatatctgcctctaaaaaccagacagaagcattctgagaaacttctttgtgatgtttgcattcaactaccagagttgaaccttccttttcatagggcagtttggaaacactctttttgtagaatctgcatgtggatatctggagcgatttgaggcctacggtcaaaaaggaaatatcttcctgggaaaaatagacgaaagcattctcagaaagtgctttgtgatatgtgcattcgactcaccgagttgaaacttttttttgatagagcagttttgaaacactctgcagaatctgaaagtggatatttggagctctttgagggcttaggcggaaaagaaaatatattcacattaaagtagacagcagcattctcagagacttctttaggatgtttgcagtaaactcacagagttgaacatacctttccgtaaagcagttttgaaaccctctgtttgtgggatctgcaagtggatatttggaccgctccgagacctttgctggaaatgggaatatcttcacatataaactagacagaagcattctcagaaacttcttggtgatgtgtgcattgtactcccaaatttgaatcttccttctcatggagcagttttgaaacactctgtgcaatctacaattggagaattggaacgcttggatgcccgtggtagaaaaggaaatatcctcatataaaaactagacagaaggattcacagaaaatgctttgtgatgtgtgcattcagatcacggagttgaatctttcttttgttagagcagttttgaaacactgtttctgtggaatctgccagcggacacttggagcgcttttagggctatggtggagaaggaaatatcttcacataaaaactagaaagaagcattctcagaaccatttatgtgaagcgtgcattcaactcacagagttgaaccttccttttgatagaacagttttgaaacactcttttgaacaattgcaggtgaatatttggagggctttgaagcctttgttggaaacgggaatatcttcacacacgaactagccagaagcattctcagaaacttctttgtgatgtgtgcgttgaacccagagagatgaaccattcctttgatagagcagttttgaaacgtgtttttgtaagatctgcaagcggatagttggcttcgctttgtgtcctttggtggaaacgggaatatcttctaataaaaactagacagaaatattctcacaatctcctttgtgatgtgggcattcaactaacacagttgaacatttcttttcacagagcagttttgagacactcttttggtagaatctgtcagtggatatttggagcgctttgagggttgttgtgccaatggaaatatctgcccctaaaatctagacagaagcattctcagaaactgcttcgtgatgtttgcattcaactcacagacttgaacatacctcttcatagagcagttttgaaaacctctttttgtagaatctgcaagtggatattcggaccacattgaggccttcataggaaacagtaatatcttcacataaaaactagatagaagcattgtcagaaagttctttgtgatgtgtgaattcaactcacagatttgaaccttcctttaatagagcagttttgaaacacactttttctagaatctgcaagtagatatttggagcgctttgaggccttcgttggaaaccggaatatcttcacaggaaaagtagatagaggcattctcagaaactttttcgtgatatgtggattcaactcacagcgttgaacctttcttttgatagagcagttttgtaaaactcttttatcgaatctgcaagtagacatttggagtgctttgagggctgtggtgcaaaaggaaatgtcttcccatagaaactagactgaagcattctcagcaacttcttggtgacgtttgcattcatctcacagtgttgaacatacctttccatagagtggttttgaaacactgtttttgtagaatcggcaagtggatatttggactgctttgaggccttcatcggaaacgggaatatcttctcataaacactagagagaagcattctcagaaacttctttgtgatctgcccattcaactcacagagttgaaccttcctttttatggagcagttttgaaacactgtttttggagaatctgcaagtggatatttggagcgctttgaggcctatggtagaaaaagaaatatctgcctctaaaaactagacagaagcattccgagaaacttctttgtgatgtttgcattcaactagcagagttgaaccttccttttgatagggcagtttggaaacactctttttgtagaagctgcatgtggatatctggagcggtttgaggcctacggtcaaaaaggaaatatcttcctgggaaaaatagacgaaagcattctcagaaagtgctttgtgatatgtgcattcgactcaccgagttgaaatttttttttgatagagcagttttgaaacactctgtagaatctgaaagtggatatttggagctctttgagggctatggcggcaaagaaactatattcacattaaagtagacagcagcattctcagaaacttctttaggatgtttgcagtaaagtcacagagttgaacatacctttccgtagagcagttttgaaacactctgtttgtgggatccgcaagtggatatttggaccgctttgagacctttgctggaaatgggaatatcttcacatataaactagacagaagcattctcagaaacttcttcgtgatgtgtgcattgtactcccaaatttgaatcttccttctcatggagcagttttgaaacacactgtttgtgcaatctacaattggagaattggaacgcttggatgcccgtggtagaaaaggaaatatcctcatataaaaactagacagaaggattcacagaaaatgctttgtgatgtgtgcattcaaatcacggagttgaatctttcttttgtcagagcagttttgaaacactgtttctgtgggatctgccagcggacacttggagcgctttgagggctgtggtggagaaggaaatatcttcccataaaaactagaaagaagcattctcagaaacatttatgtgaagcgtgcattcaactcacagagttgaaccttcctttggatacaacagttttgaaacactcttttgaacaattgcaggtgaatctttggagcgctttgaagcctttgttggaaatgggaatatcttcacacacaaactaaccagaagcattctcagaaacttctttgtgatgcgtgcgttgaacccagagagatgaacctttcctttgatagagcagttttgaaacgtgtttttgtaagatctgcaagcggataattggcttcgctttgtgtcctttggtgggaacgggaatatcttctaataaaaattagacagaaatattctcagaatcttctttgtgatgtgggcattcaactaacacagttgaacatttcttttcacagaacagttttgaaacactcttttgaacaattgcaggtgaatctttggagcgctttgaagcctttgttggaaataggaatatattcacaaacaaactagccagaagcatgctcagaaactacttcgtgatgtctgcattcaacacacagagttgaacatacctcttcacagagcagttttgaaaacctctttctgtagaatctgcaagtggatattcggaccactttgaggccttcataggaaacagtaatatcttcacataaaaactagatagaaagcattgtcagaaagttctttgtgatgtgtgaattcaactcacagagttgaaccttcctttaatagagcagttttgaaacactctttttctagaatctgcaagtagatatttggagcgctttgaggccttctttggaaaccggaatatcttcacataaaaagtagatagggcattctcagaaactttttcgtgatatgtggattcaactcacagcgttgaacctttcttttgatagagcagttttgtaaaactcctttatcgaatctgcaagtagacatttggagtgctttgggggctgtggtgcaaaaggaaatgtcttcccatagaaactagactgaagcattctcagcaacttctttgtgacgtttgctttcatctcacagtgttgaacatacctttccatagagtagttttgaagcactatttttgtagaatctgcaagtggatatttggactgctttgaggccttcatcggaaacgggaatatcttcacataaacactagacagaagcattctcagaaacttctttgtggtctgtccattcaactcacagagttgaaccttcctttttatggagcagttttgaaacactgttttcggaggatctgcaagtggatatttggagcactttgaggcctacggtagaaaaagaaatatctgcctatgacaactagacagaagcattccgagaaaagttctttgtgatgtttgcattcaactagcagagttgaaccttccttttgatagggcagtttggaaacactctttttgtagaatctgcatgtggatatctggagcggtttgaggcctacagtcaaaaaggaaatatcttcctgggaaaaatagacgaaagcattctcagaaactgctttgtgatatgcgcattcgactcaccgagttgaaacttttttttgatacagcagttttgaaacactctgtagaatctgaaagtggatatttggagctctttgagggctatggcggaaaagaaaatatattcacattaaagtagacagcagcattctcagaaacttctttaggatgtttgcagtaaactcacagagttgaacatacctttccgtagagcagttttgaaacactctgtttgtgggatccgcaagtggatatttggaccgctttgagacctttgctggaaatgggaatatcttcacgtataaactagacagaagcattttcagaaacttcttcgtgatgtgtgcattctactcccaaatttgaatcttccttctcatgaagcagttttgaaacactctgtttgtgcaatccacaattggatatttggaacgctttgatgcccgttgtagaaaaggtaatatcctcatataaaaactagacagaaggattcacagaaaatgctttgtgatgtgtgcattcaaatcacggagttgaatctttcttttgttagagcagttttgaaacactctttctgtggaatctgccagcggacacttggagcgctttgagggctgtggtggagaaggaaatatcttcccataaaaactagaaagaagcatactcagaaacatttatgtgaagcgtgcattcaactcacagagttgaaccttccttttgatacaacagttttgaaacactcttttgaacaattgcaggtgaatctttggagcgctttgaagcctttgttggaaatgggaatatcttcacacacaaactagccagaagcattctcagaaacttctttgtgatgtgtgcgttgaacccagagagatgaacctttcctttgatagagcagttttgaaacgtgtttttgtaagatcggcaagcggataattggcttcgctttgtgtcctttggtggaaacgcgaatatcttctaataaaaactagacagaaatattctcagaatctcctttgtgatgtgggcattcaactaacacagttgaacatttcttttcacagagcagttttgaaacactcttttggtagaatctgccagtggatatttggagcgcttggagggctattgtgccaatggaagtatctgcccctgaaaactatacagaagcattctcagaaactacttcgtgatgtttgcattcaactcacagagttgaacatacctcttcatagagcagttttgaaaacctctttctgtagaatctgtaagtggatattcggaccactttgaggccttcataggaaacagtaatatcttcacataaaaactagatagaagcattgtcagaaagttctttgtgatgtgtgaattcaactcacagagttgaactttcctttaatagagcagttttgaaacactctttttctagaatctgcaagtagatatttggagcgctttgaggccttcgttggaatccggaatatcttcacataaaacgtagatagaggcatgctcagaaacttttttgtcatatgtagattcaactcacagcgttgaacctttcttttgatagagcagttttgaaaaactcttttatcgaatctgcaagtagacatttggagtgctttgagggctcaggtgcaaaaggaaatgtcttcccatagaaactagactgaagctttctcagcaacttcttggtgacgtttgcattcatctcacagtgttgaacatacctttccatagagtagttttgaaacactgtttttgtagaatcggcaagtggatatttggactgctttgaggccttcatcggaaacgggaatatcttcacataaacactagagagaagcattctcagaaacttctttgtcatctgtccattcaactcacagagttgaaccttcctttttatggagcagttttgaaacactccttttggagaatctgcaagtggatatttggagcgatttgaggcctatggtagaaaaagaaatatctgcctctaaaaaccagacagaagcattccgagaaacttctttgtgatgtttgcattcaactagcagagttaaaacttccttttgatagggcagtttggaaacactctttttgtagaatctgcatgtggatatctggagcggtttgaggcctacggtcaaaaaggaaatatcttcctgggaaaaatagacgaaagcattctcagaaagtgctttgtgatatgcgcattcgactcaccgagttgaaacttttttttgatagagcagttttgaaacactctgtagaatctgaaagtggatatttggagcactttgagggctatggcggaaaagaaaatatattcacattaaagtagacagcagcattctcagaaacttctttaggatgtttgcagtaaactcacagagttgaacctacctttccgtagagcagttttgaaacactctgtttgtgggatccgcaaggggatatttggaacgctttgagacctttgctggaaatgggaatatcttcacatataaactagacagaagcattctcagtaaacttcttcgtgatgtgtgcattctactcccaaatttgaatcttccttttcatgaagcagttttgaaacactctgtttgtgcaatccacaattggataattggaacgctttgatgcccatggtagaaaaggaaatatcctcatataaaaactagacagaaggattcacagaaaatgctttgtgatgtgtacattcaaatcacggagttgaatctttcttttgtcagagcagttttgaaacactgtttctgtggaatctgccagcggacacttggagcgctttgagggctgtggtggagaaggaaatatcttcccataaaaactagaaagaagcattctcagaaccatttatgtgaagcgtgcattcaactcacagagttgaaccttccttttgatagaacagttttgaaacactcttttgaacaattgcaggtgagtatttggagggctttgaagcctttgttggaaatgggaatatcttcacacacaaactagccagaagcattctcagaaacttctttgtgatgtgtgcattgaacccagagagatgaacctttcctttgatagagcagttttgaaacgtgtttttgtaagatctgcaagcggatagttggcttcgctgtgtgtcctttggtggaaacgggaatatcttctaataaaaactagacagagatattctcagaaacttctttgtgatgtgggcattcaactaacacagttgaacatatcttttcacagagaagttttgaaacactcttttggtcgaatctgccagtggatatttggagcgctttgagggctattgtgccaatggaaatatctgcccctaaaaactagacagaaacattctcagaaactgctttgtgatgtttgcattcaactcacacaggtgaacatacctcttcatagagcagttttgcaaacctctttttgtagaatctgcaagtggatattcggaccactttgaggccttcataggaaacagtaatatcttcacataaaaactagacagaagcattgtcagaaagttctttgtgatgtgtgaattcaactcacagagttgaaccttcctttaatagagcagttttgaaactctctttttgtagaatctgcaagtagatatttggagcgctttgaggccttctttggaaaccggaatatcttcacataaaaagtagatagaggcattctcagaaactttttcgtgatatgtggattcaactcacagcgttgaacctttcttttgatagagcagttttgtaaaactcttttatcgaatctgcaagtagacatttggagtgctttgggggctgtggtgcaaaaggaaatgtcttcccatagaaactagactgaagcattctcagcaacttcttggtgacgtttgcattcgtctcacagtgttgaacatacctttccatagagtggttttgaaacactgtttttgtagaatcggcaagtggatatttggactgctttgaggccttcatcggaaacgggaatatcttcacataaacactagagagaagcattctcagaaacttctttgtcatctgtccattcaactcacagagttgaaccttcctttttatggagcagttttgaaacactccttttggagaatctgcaagtggatatttggagcgctttgaggcctatggtagaaaaagaaatatccgcccctaaaaaccagacagaagcattctgagaaacttctttgtgatgtttacattcaactaccagagttgaaccttccttttgatagggcagtttggaaacactctttttgtagaatctgcatgtggatatctggagcgatttgaggcctacggtccaaaaggaaatatcttcctgggaaaaatggacgaaagcattctcagaaactgctttgtgatatgtgcattcaactcaccgagttgaaactttttttggatagagcagttttgaaacactctgtagaatctgaaagtggatatttggagctctttgagggctatggtggaaaagaaaatatattcacattaaactatacagcagcattctcagaaacatctttaggatgtttgcagtaaactcatagagttcaacatacctttccgtagagcagctttgaaacactctgtttgtgggatccgcaagtggatatttggaccgctttgagacctttgctggaaatgggaatatcttcacatataaactagacagaagcattctcagaaacttcttcgtgacgtgtgcattgtactcccaaatttgaatcttccttctcatggagcagttttgaaacactctgtttgtgcaatctacaattggagaattggaaggcttggatgcccatggtagaaaaggaaatatcctcatataaaaactagacagaaggattcacagaaaatgctttgtgatgtgtgcattcaaatcacggggttgaatctttcttttgttagagcagttttgaaacactgtttctgaggaatctgccagcggacacttggagcgctttgagggtcatggtggagaaggaaatatctttccataaaaactagaaagaagcattctcagaaacatttatgtgaagcgtgcattcaactcacagagttgaaccttccttttgatacaacagttttgaaacactcttttgaacaattgcaggtgaatcttcggagcgctttgaagcctttgttggaaatgggaatatcttcacacacaaactagccagaagcattctcagaaacatctttgtgatgtgtgcgttgaacccagagagatgaacctttcctttgatagagcagttttgaaacgtgtttttgtaaggtctgcaagcggataatgggcttcgctttgtgtcctttggtggaaacgggaatatcttctaataaaaactagacagaaatattctcagaatcttctttgtgatgtgggcattcaactaacacagttgaacgtttcttttcacagagcagttttgaaacactcttttggtagaatctgccagtggatatttggagcgctttgagggctattgtgccaacggaaatatctgcccctaaaaactagacagaagcattctcagaaactacttcgtgatgtttgcattcaacacacagagttgaacatacctcttcacagagcagttttgaaaacctctttctgtacaatctgcaagtggatattcggaccactttgaggccttcataggaaacagtaatatctttgcataaaaactagatagaagcattgtcagaaagttctttgtgatgtgtgaattcaactcacagagttgaaccttccttcaatagagcagttttgaaacactctttttccagaatctgcaagtagatatttcgagcgctttgaggccttcgttggaaaccggaatatcttcacaggaaaagtagatagaggcattctcagaaacttttttgtgatatgtagattcaactcacagcgttgaacctttttttggatggagcagttttgaaaaactcttttatcgaatctgcaggtagacatttggggtgctttgagggctgtggtgcaaaaggaaatgtcttcccatagaaactagactgaagcattctcagcaacttcttggtgacgtttgcattcatctcacagtgttgaacatacctttccatagagtggttttgaaacactgtttttgtagaatcggcaagtggatatttggactgctttcaggccttcatcacaaacgggaatatcttcacataaacactagagagaagcattctcagaaacttctttgtcatctgtccattcaactcacagagttgaaccttcctttttctggagcagttttgaaacactctttttcgagaatctgcaagtggatatttggagcgctttgaggcctatggtagaaaaagtaatatctgcctctaaaaaccagacagaagcattctgagaaacttctttgtgatgtttgccttcaactaccagagttgaaccttccttttgatagggcagtttggaaacactctttttgtagaatctgcatgtggatatctggagcgatttgaggcctacggtccaaaaggaaatatctgcctgggaaagatagacgaaagcattctcagaaagtgctttgtgatatgtgcattcgactcaccgagttgaaacttttttttgatagagcagttttgaaacactctgtagaatctgaaagtggatatttggagctctttgagggctatggcggaaaagaaaatatattcacattaaggtagacagcagcattcttagaaacttctttaggatgtttgcagtaaactcacagagttgaacctacctttccgtagagcagttttgaaacactctgtttgtgggatccgcaagtggatatttggaccgctttgagacctttgctggaaatgggaatatcttcacatataaactaggcagaagcattctcagaaacttcttcgtgatgtgtgcattctactcccaaatttgaatcttccttttcatgaagcagttttgaaacactcggtttgtgcaatccacaattggataattggaacgctttgatgcccatggtagaaaaggaaatatcctcatataaaaactagacagaaggattcacagaaaatgctttgtgatgtgtgcattcaaatcacggagttgaatctttcttttgtcagagcagttttgaaacactgtttctgtggaatctgccagcggactcttggagctctttgagggctatggtggagaaggaaatatcttcccataaaaagtagaaagaagcattctcagaaacatttatgtgaagcgtgcattcaactcacagagttgaaccttccttttgatacaacagttttgaaacactcttttgaacaattgcaggtgaatctttggagcgctttgaagcctttgttggaaatgggaatatattcacacacaaactagccagaagcattcccagaaacttctttgtgatgtgtgcgttgaacccagagagatgaacctttcctttgatagagcagttttgaaacgtgtttttgtaagatcggcaagcggataattggcttcgctttgtgtcctttggtggaaacgggaatatcttctaataaaaactagacagaaatattctcacaatctcctttgtgatgtgggcattcaactaacacagttgaacatttcttttcacagagcagttttgagacactcttttggtagaatctgccagtggatatttggagcgctttgagggctgttgtgccaatggaaatatctgcccctaaaatctagacagaagcattctcagaaactgttttgtgatgtttgcattcaactcacagaggtgaacatacctcttcatagagcagttttgcaaacctctttttgtagaatctgcaagtggatattcggaccactttgaggccttcataggaaacagtaatatcttcacataaaaactagatagaagcattgtcagaaagttctttgtgatgtgtgaattcaactcacagagttgaaccttcctttaatagagcagttttgaaacactctttttctagaatctgccagtagatatttggagcgctttgaggccttcgttggaatccggaatatcttcacataaaaagttgatagaggcattctcagaaacttttttgtgatatgtagattcaactcacagcgttgaacctttctttggatggagcagttttgacaaacccttttatcgaatctgcaggtagacatttggggtgctttgagggctgtggtgcaaaaggtaatgtcttcccatagaaactagactgaagcattctcagcaacttcttggtgacgtttgcattcatctcacaagtgttgaacatacctttccatagagtagttttgaaacactgtttttgtagaatcggcaagtggatatttggactgctttgaggccttcatcggaaacgggaatatcttcacataaacactagagagaagcattctcagaaactactttgtgatctgtccattcaactcacagagttgaaccttcctttttatggagcagttttgaaacactgtttttggagaatctgcaagtggatatttggagcgcttttaggcctatggtagaaaaagaaatatctgcctattacaactagactgaagcattctgtgaaacttctttgtgatgtttgccttcaactaccagagttgaaccttccttttgatagggcagtttggaaacactctttttgtagaatctgcatgtggatatctggagcgatttgaggcctacggtccaaaaggaaatatcttcctgggaaagatagacgaaagcattctcagaaactgctttgtgacatgtgcattcgactcaccgagttgaaactttttttggatagagcagttttgaaacactctgtagaatctgaaagtggatatttggagctctttgagggctatggcggaaaagaaaatatattcacattaaactagacagcagcattcccggaaacttctttaggatgtttgcagtaaactcacagagttgaacatacctttccgtagagcagttttgaaacactctgtttgtgggatccgcaagtggatatttggaccgctttgagacctttgctggaaacgggaatatcttcacatataaactagacagaagcattctcagaaacttcttcgtgatgtgtgcattctactcccgaatttgaatcttccttttcatgaagcagttttgaaacactctgtttgtgcaatccacaattggataaatggaacgctttgatgcccatggtagaaaaggaaatatcctcatataaaaactagacagaaggattcacagaaaatgctttgtgatgtgtgcattcaaatcacagagttgaatctttcttttgttagagcagttttgaaagactgtttctgtggaatctgccagcggacacttggagcgctttgagggctacggtggagaaggaaatatcttcacataaaaactagaaagaagcattctcagaaacatttatgtgaagcgtgcattcaactcacagagttgaaccttcctttggatacaacagttttgaaacactcttttgaacaattgcaggtgaatctttggagcgctttgaagcctttgttggaattgggaatatcttcacacacaaactagccagaaacattctcagaaacttctttgtgatgtgtgcgttgaacccagagagatgaacctttcctttgatagagcagttttgaaacgtgtttttgtaagatctgcaagcggatagttggcttcgctttgtgtcctttgttggaaacgggaatatcttctaataaaaactagacagaaatattctcagaatcttcttcgtgatgtgggcattcaactaacacagttgaacctttcttttcacagagcagtttggaaacacccttttggtagaatctgccagtggatatttggagcgctttgagggctattgtgccaacggaaatatctgcccctaaaaactagacagaagcattctcagaaactgctctgtgatgtttgcattcaactcacagagttgaacatacctcttcatagagcacttttggaaacctctttttgtagaatctgcaaggggatattcggaccactttgaggccttcataggaaacagtaatatcttcacataaaaactagatagaagcattgtcagaaagttctttgtgatgtgtgaattcaactcacagagttgaaccttccttcaatagagcagttgtgaaacactctttttctagaatctgcaagtggatacttggagcgctttgaggccttcgttggaaaccggaatatcttcacaggaaaagtagatagaggcattctcagtaaacttttttgtgatatgtagattcaactcacagcgttgaacctttctttggatggagcagttttgaaaaactcttttatcgaatctgcaggtagacatttggggtgctttgagggctgtggtgcaaaaggaaatgtcttcccatagaaactagactgaagcattctcagcaacttctttgtgacgtttgcattcatctcacagtgttgaacatacctttccatagagtagttttgaaacactgtttttgtagaatctgcaagtggatatttggactgctttgaggccttcatcggaaacgggaatatcttcacataaacactagacagaagcatcctcagaaacttctttgtcatctgtccattcaactcacagatttgaaccttcctttttctgcagcagttttgaaacactctttttggagaatctgcaagtggatatttggagcgctttgaggcctatggtagaaaaagaaatatctgcctctaaaaaccagacagaaagcattccgagaaacttctctgtgatgtttgcattcaactagcagagttgaaccttccttttgatagggcagtttggaaacactctttttgtagaatctgcatgtggatatctggagcggtttgaggcctacggtcaaaaaggaaatatcttcctgggaaaaatagacaaaagcattctcagaaactgctttgtgatatgggcattcgactcaccgagttgaaacttttttttgatagagcagttttgaaacactctgtagaatctgaaagtggatatttggagctctttgagggctatggcggaaaacaaaatatattcacattaaagtagacagcagcattcccagaaacttctttaggatgtttgcagtaaactcacagagttgaacatacctttccgtagagctgttttgaaacactctgtttgtgggatccgcaagtggatatttggaccgctttgagacctttgctggaaacgggaatatcttcacatataaactagacagaagcattctcagaaacttcttcgtgatgtgtgcattctactcccaaatttgaatcttccttttcatgaagcagttttgaaacactctatttgtgcattctacaattggatgattggaacgctttgatgcccatggtagaaaaggaaatatcctcatataaaaactaggcagaaggattcacagaaaatgctttgtgatgtgtgcattcagatcacggagttgaatctttcttttgttagagcagttttgaaacactgtttctgtggaatctgccagcggacacttggagcgctttgagggctatggtggagaaggaaatatcttcacataaaaactagaaagaagcattctcagaaccatttatgtgaagcgtgcgttcaactcacagagttgaaccttccttttgatagaacagttttgaaacactcttttgaacaattgcaggtgaatatttggagggctttgaagccttttttggaaatgggaatatcttcacacacaaactagccagaagcattctcagaaacttctttgtgatgtgtgcgttgaacccagagagatgaacctttcctttgatagagctgttttgaaacgtgtttttctaacatctgcaagcggataattggcttcgcgttgtgtcctttggtggaaacgggaatatcttctaataaaaactagacagaaatattctcagaatcttctttgtgatgtgggcattcaactaacacagttgaacgtttcttttcacagagcagttttgaaacactcttttggtagaatctgccagtggatatttggagcgctttgagggctattgtgccaatggaaaatctgcccctaaaaactagacagaagcattctcagaaactacttcgtgatgtttgcattcaactcacagagttgaacatacctcttcacagagcagttttgaaaacctctttttgtagaatctgcaagtggatattcggagcactttgaggccttcataggaaacagtaatgtcttcgcataaaaactagatagaagcattgtcagaaagttctttgtgatgtgtgaattcaactcacagagttgaaccttcctttaatagagcagttttgaaacactctttttctagaatctgcgagtagatatttggagcgctttgaggccttcgttggaaaccggaatatcttcacatagaaagtagatagaggcattctcagaaacttttttgtgatatgtagattcaactcacagcgttgaacctttctttggatggagcagttttgaaaaactcttttatcgaatctgcaggtagacatttggggtgctttgagggctgtggtgcaaaaggaattgtcttcccatagaaactagactgaagcattctcagcaacttcttggtgacgtttgcattcatctcacagtgttgaacatacgtttccatagagtggttttgaaacactgtttttgtagaatcggcaagtggatatttggactgctttgaggccttcatcggaaacgggaatatcttcacataaacactagagagaagcaatctcagaaacttctttgtgatctgtccgttcaactcacagagttgaaccttcctttttatggagcagttttgaaacactgtttgtggagaatctgcaagtggatatttggagcgccttgaggccaatggtagaaaaagaaatatctgcctctaaatactagactgaagcattccgagaaactcctttgtgatgtttgcattcaactagcagagttgaaccttccttttgatagggcagtttggaaacactctttttgtagaatctgcatgtggatatctggagcggtttgaggcctacggtcaaataggaaatatcttcctgggaaaaatagacgaaagcattctcagaaactgctttgtgatatgtgcattcgactcaccgagttgaaactattttttgatagagcagttttgaaacactctgtagaatctgaaagtggatatttggagctctttgagggctatggcggaaaagaaaatatattcacattaaagtagacagcagcattctcagaaacttctttaggatgtttgcagtaaactcagagagttgaacataccttacggtagagtagttttgaaacactctgtttgtgggatcctcaagtggatatttggaccgctttgagacctttgctggaaatgggaatatcttcacatataagctagacagaagcattctcagaaacttcttggtgatgtgtgcattgtactcccaaatttgaatcttccttctcatggagcagttttgaaacactctgtttgtgcaatctacaattggagaattggaatgcttggatgcccgtggtagaaaaggaaatatcctcatataaaaactagacagaaggattcacagaaaatgctttgtgatgtgtgcattcaaatcacggagttgaatctttctttcgttagagcagttttgaaacactgtttctgtggaatctgccagcggacacttggagcgctttgagagctatggtggagaaggaaatatcttcacataaaaactagaaagaagcattctcagaaacatttatgtgaagcgtgcattcaactcacggagttgaaccttccttttgatacaacagttttgaaacactctttggaacaattgcaggtgaatctttggagcgctttgaagcctttgttgcaaatgggaatatcttcacacacaaactagccagaagcattcccagaaacttctttgtgatgtgtgcgttgaacccagagagatgaacctttcctttgatagagcagttttgaaacgtgtttttgtaagatctgcaagcggataattggctttgctttgtgtcccttggtgaaaacgggaatatcttctaataaaaactagacagaaatattctcagaatctcctttgtgatgtgggcattcaactaacacagttgaacatttcttttcacagagcagttttgaaacactcttttggtagaatctgccagtggatatttggagcgcttggagggctattgtgccaatggaaatatctgcccctgaaaactggacagaagcattctcagaaactacttcgtgatgtttgcattcaacacacagagttgaacatacctcttcacagagcagttttgaaaacctctttctgtagaatctgcaagtggatattcggaccactttgaggccttcataggaaacagtaatatcttcacataaaaactggatagaagcattgtcaggaagttctttgtgatgtgtgaattcaactcacagagttgaaccttcctttaatagagcagttttgaaacactctttttctagaatctgcaagtagatatttggagcgcttggaggccttctttggaaaccggaatatcttcaaaggaaatgtagatagaggcattctcagaaacattttttgtgatatgtagactcaactcacagcgttgaacctttctttggatggagcagttttgaaaaactcttttatcgaatctgcaggtagacatttggggtgctttgagggctgtggtgcaaaaggaaatgtcttcccatagaaactagactgaagcattctcagcaacttctttgtgacgtttgcattcatctcacagtgttgaacatacctttccatagagtagttttgaaacactgtttttgtagaatcggcaagtggatatttggactgctttgaggccttcatcggaaacgggaatatcttcacataaacgctagagagaagcattctcagaaacttctttgtgatctgtccattcaactcacagagttgaaccttcctttttctggagcagttttgaaacactgttcttggagaatctgcaagtggatatttggagcgctttgaggcctgtggtagaaaaagaaatatctgcctctaaaaactagacagaagcattccgagaaacttctctgtgatgtttgcattcaactagcagagttgaaccttccttttgatagggcagtttggagacactctttttttagaatctgcatgtggatatctggagcggtttgaggcctacggtcaaaaaggaaatatcttcctgggaaaaatagacgaaagcattctcagaaactgctttgtgatatgtgcattcgactcaccgagttgaaacttttttttgatagagcagttttggaacactctgtagaatctgaaagtgtagatttggagctctttgagggctatggcggagaagaaaatatattcacattaaactagacagcagcattcccagaaacttctttaggatgtttgcagtaaactcacagagttgaacatacctttccgtagagcagttttgaaacactctgtttgtgggatccgcaagtggatatttggaccgctttgagacctttgctggaaacgggaatatcttcacatataaactagacagaagcattctcagaaacttcttcgtgatgtgtgcattctactcccgaatttgaatcttccttttcatgaagcagttttgaaacactctgtttgtgcaatccacagttggataattggaaggctttgatgcccatggtagaaaaggaaatatcctcatataaaaactagacagaaggattcacagaaaatgctttgtgatgtgtgcattcaaatcacggagttgaatctttcttttgtcagagcagttttgaaaaaatgtttctgtggaatctgccagcggacacttggagcgctttgagggctatggtggagaaggaaatatcttcccataaaaactagaaagaagcattctcagaaccatttatgtgaagcgtgcattcaactcacagagttgaaccttccttttgatagaacagttttgaaacactcttttgaacaattgcaggtgaatatttggagggctttgaagcctttgttggaaatgggaatatcttcacacacaaactagccagaagcattctcagaaacttctttgtgatgtgtgcgttgaacccagagagatgaacctttcctttgatagagcagttttgaaacttgtttttgtaagatcggcaagcggataattggcttcgctttgtgtcctttggtggaaacgggaatatcttctaataaaaactagacagaaatattctcagaatcttatttgtgatgtaggcattccactaacacagttgaagatttcttttcatagagtagttttgaaacactcttttggtagaatctgccagtggatatttggagcgctttgagggctattgtgccaatggaaatatcttcccctgaaaactagacagaagcattctcagaaactacttcgtgatgtttgcattcaactcacagagttgaacatacctcttcatagagcagttttgaaaacctctttctgtagaatctgcaagtggatattcggaccactttgaggccttcataggaaacagtaatatcttcacataaaaactagatagaagcattgtcagaaagttctttgtgatgtgtgaattcaactcacagtagttgaaacttcctttaatagagcagttttgaaacactctttttctggaatctgcaagtagatatttggagcgctttgaggccttcgttggaaaccggagtatcttcacaggaaaagtagataggggcattctcagaaacttgttttgtgatatgtagattcaactcacagcgttgaacctttctttggatggagcagttttgaaaacctcttttatcgaatctgcaggtaaacatttggggtgctttgagggctgtggtgcaaaaggaaatgtcttcccatagaaactagactgaagcattctcagaaactactttgtgacgtttgcattcatctcacagtgttgaacatacctttccatagagtagttttgaagcactatttttgtagaatctgcaagtggatatttggactgctttgaggccttcatcggaaacgggaatatcttcacataaacactagacagaagcattctcagaaacttctttgtgatctgtccattcaactcacagagttgaaccttcctttttatggagtagttttgaatcactgtttttggagaatctgcaagtggatatttggagcgctttgaggcctatggtagaaaaagaaatatctgcctctaaaaaccagacagaagcattccgagaaacttctctgtgatgtttgcattcaactagcagagttgtaccttccttttgatagggcagtttggaaacactctttttgtagaatctgcatgtggatatctggagcggtttgaggcctacggtcaaaaaggaaatatcttcctgggaaaaatagacgaaagcattctcagaaactgctttgtgatatgggaattcgactcaccgagttgaaacttttttttgatagagcagttttgaaacactctgtagaatctgaaagtggatatttggagctcttgcagggctatggcggaaaagaaaatatattcacattaaagtagacagcagcattctcagaaacttctttaggatgtttgcagtaaactcacagagttgaacctacctttctgtagagcagttttgaaacactctgtttgtgggatccgcaagtggatatttggaccgctttgagacctttgctggaaatgggaatatcttcacatataaactagacagaagcattctcagaaacttcttcatgatgtgtgcattctcctcccgaatttgaatcttccttttcatgaagcagttttgaaacactctgtttgtgcaatccacaattggataattggaacgctttgatgcccatggtagaaaaggaaatatcctcatataaaaactagacagaaggattcacagaaaatgctttgtgatgtgtgcattcaaatcacggagttgaatctttcttttgttagagcagttttcaaacactgtttctgtggaatctgccagcggacacttggagcgctttgagggctgtggtggagaaggaaatatcttcccataaaaactagaaagaagcattctcagaaacatttatgtgaagcgtgccttcaactcacagagttgaaccttccttttgatacaacagttttgaaacactctttggaacaattgcaggtgaatctttggagcgctttgaagcctttgttggaaatgggaatatcttcacacacaaactagccagaagcattctcagaaacttctttgtgatgtgtgcgttgaacccagagagatgaacctttcctttgaaagagcagttttgaaacgtgtttttgtaagatctgcaagcggatagttggcttcgctttgtgtcctttggtggaaacgggaatatcttctaataaaaactagacagaaatattctcagaatcttctttgtgatgtgggcattcaactaacacagttgaacctttcttttcacagagcagttttgaaacactcttttggtagaatctgccagtggatatttggagcgctttgagggctattgtgccaacggaaatatctgcccctaaaaactagacagaagcattctcagaaactacttcgtgatgtttgcattcaactcacagagttgaacatacctcatcacagagcagttttgaaaacctctttttgtagaatctgcaagtgtatattcggagcactttgaggccttcataggaaacagtaatatcttcgcataaaaactagatagaagcattgtcaggaagttctttgtgatgtgtgaattcaactcacagagttgaaccttcctttaatagagcagttttgaaacactctttttctagaatctgcaagtagatatttggagcgcttagaggccttctttggaaaccggaatatcttcacaggaaatgtagatagaggcattctcagaaacattttttgtgatatgtagattcaactcacagcgttgaacctttctttggatggagcagttttgaaaaactcttttatcgaatctgcaggtagacatttggggtgctttgagggctgtggtgcaaaaggaaatgtcttcccatagaaactagactgaagcattctcagcaacttctttgtgacgtttgcattcatctcacagtgttgaacatacctttccatagagtagttttgaaatactgtttttgtagaatcggcaagtggatatttggactgctttgaggccttcatcggaaacgggaatatcttcacataaacactagagagaagcattctcagaaacttctttgtgatctgtccattcaactcacagagttgaaccttcctttttatggagcagttttgaaacactccttttggagaatctgcaggtggatatttggagcgctttgaggcctatggtagaaaaagaaatatctgcctctaaaaaccagacagaagcattctgagaaacttctttgtgatgtttgccttcaactaccagagttgaaccttccttttcatagggcagtttggaaacactctttttgtagaatctgcatgtggatatctggagcgatttgaggcctacggtccaaaaggaaatatcttcctgggaaagatagacgaaagcattctcagcaactgctttgtgatatgtgcattcgactcaccgagttgaaacttttttttgatagagcagttttgaaacactctgtagaatctgaaagtggatatttggagatctttgagggctatgtcggaaaagaaaatatattcacattaaagtagacagcagcattcccagaaacttctttaggatgtttgcagtaaactcacagagttgaacatacctttccatagagcagctttgaaacactctgtgtgtgggatccgcaagtggatatttggaccgctttgagacctttgctggaaacgggaatatcttcaaatataaactggacagaagcattctaagaaacttcttcttgatgtgtgcattctactccagaatttgaatcttccttctcatgaagcagttttgaaacactctatttgcgcaatctacaattggataattggaacgctttgatgcccatggtagaaaaggaaatatcctcatataaaaactagacagaaggattcacagaaaatgctttgtgatgtgtgcattcaaatcacggagttgaatctttcttttgttatagcagttttgaaacactgtttctgtggaatctgccagcggacacttggagcgctttgagggctgtggtggagaaggaaatatcttcccataaaaactagaaagaagcattctcagaaccatttatgtgaagcgtgcgttcaactcacagagttgaaccttccttttgacagaacagttttgaaacactcttttgaacaattgcaggtgaatatttggagggctttgaagcctttgttggaaatgggaatatcttcacacacaaactagccagaagcattctcagaaacttctttgtgatgtgtgcgttgaacccagagagatgaacctttcctttgacagagcagttttgaaacgtgtttttgtaagatctgcaagcggatagttggcttcgctgtgtgtcctttggtggaaacgggaatatcttctaataaaaactagacagaaatattctcagaatctcctttgtgatgtgggcattcaactaacacagttgaacatttcttttcacagagcagttttgaaacactcttttggtagaatctgccagtggatatttggagcgcttggaggactattgtgccaatggaaatatctgcccctgaaaactggacagaagcattctcagaaactaattcgtgatgtttgcattcaacacacagagttgaacatacctcttcacagagcagttttgaaaacctctttctgtagaatctgcaagtggatattcggaccactttgaggccttcataggaaacagtaatatcttcacataaaaactagatagaagcattgtcagaaagttccttgtgatgtgtgaattcaactcacagagttgaaccttcctttaatagagcagttttgaaacactcttcttctagaatctgcaattagatatttggagcgctttgaggccttcattggaaaccggaatatcttcacagaaaaagtagatagaggcattctcagaaacttttttgtgatatgtagattcaactcacagcgttgaacctttctttggatggagcagttttgaaaaacccttttatcgaatctgcaggtagacatttggggtgctttgagggctgtggtgcaaaaggaaatgtcttcccatagaaactagactgaagcattctctcaacttctttgtgacgtttgcattcatctcacagtgttgaacatacctttccatcgagtacttttgaaacactgtttttgtagaatctgcaagtggatatttggactgctttgaggccttcatcggaaacgggaatatcttcacataaacactagagagaagcattctcagaaacttctttgtcatctgtccattcaactcacagagttgaaccttcctttttatggagcagttttgaaacactccttttggagaatctgcaagtggatatttggagcgctttgaggcctatggtagaaaaagaaatatctgcctctgaaaaccagacagaagcattccgagaaacttctttgtgatgtttgcattcaactagcagagttgaacttccttttgatagggcagtttggagacactctttttgtagaatctgcatgtggatatctggagcggtttgaggcctacggtcaaaaaggaaatatcttcctgggaaaaatagacgaaagcattctcagaaactgctttgtgatatgtgcattcgactctccgagttgaaacttttttttgatagagcagttttgaaacactctgtagaatctgaaagtggatatttggagctcttcgagggctatggcggaaaagaaaatgtattcacattaaactagacagcagcattcccagaaacttctttaagatgtttgcagtaaactcacagagttgaacatacctttccgtagagcagctttgaaacactctgtgtgtgggatccgcaagtggatatttggaccgctttgagacctttgctggaaacgggaatatcttcacatataaactggacagaagcattgtcagaaacttcttcgtgatgtgtgcattctactcccgaatgtgaatcttccttttcatgaagcagttttgaaacactctgtttgtgcaatccacaattggataattggaacgctttgatgcccatggtagaaaaggaaatatcttcatataaaaactagacagaaggattctcagaaaatgctttgtgatgtgtgcattcaaatcacggagttgaatctttcttttgttagagcagttttgaaacactgtttctgtggaatctgccagcggacacttggagcgctttgagggctatggtggagaaggaaatatcttcacataaaaactagaaagaagcattctcagaaccatttatgtgaagcgtgcattcaactcacagagttgaaccttccttttgatagaacagttttgaaacactcttttgaacaattgcaggtgaatatttggagggctttgaagcctttgttggaaatgggaatatcttcacacacaaactagccagaagcattctcagaaacttctttgtgatgtgtgcgttgaacccagagagatgaacctttccttggatagagcagttttgaaacgtgtttttgtaagatcggcaagcggataattggcttcgctttgtgtcctttggtggaatcgggaatatcttctaataaaaactagacagaaatattctcagaatctcctttgtgatgtgggcattcaactaacacagttgaacatttcttttcacagagcagttttgaaacactcttttggtagaatctgccagtggatatttggtgcgcttggagggctattttgccaatggaaatatctgcccctgaaaactagacagaagcattctcagaaactacttcgtgatgtctgcattcaacacacagagttgaacatacctcttcacagagcagttttgaaaacctctttctgtagaatctgcaagtggatattcggaccactttgaggccttcgtaggaaacagtattatcttcacataaaaactagatagaagcattgtcagaaagttctttgtgatgtgtgaattcaactcacagagttgaaccttcctttaatacagcagttttgaaacactctttttctagaatctgcaagtagatatttggagcgctttgaggccttcgttggaaaccggaatatcttcacaggaaaagtagatagaggcattctcagaaactttttcgtgatatgtggattcaagtcacagcgttgaacctttcttttgatagagcagttttgtaaaactcctttatcgaatctgcaagtagacatttggagtgctttgggggctgtggtgcaaaaggaaatgtcttcccatagaaagtagactgaagcattctcagcaacttcttggtgacgtttgcattcatctcatagtgttgaacatacctttccatagagtggttttgaaacactgtttttgtagaatcggcaagtggatatttggactgctttgaggccttcatcggaaacgggaatatcttcacataaacactagagagaagcattctcagaaactactttgtgatctgtccattcaactcacagagttgaaccttcctttttatggagcagttttgaaacactgtttttggagaatctgcaagtggatatttggagcgctttgaggcctatggtagaaaaagaaatatctgcctattacaactagacagaagcattctcagaaacttctttgtgatgtttgcattcaactaccagagttgaaccttccttttgatagggcagtttggaaacactctttttgtagaatctgcatgtggatatctggagcgatttgaggcctacggtccaaaaggaaatatcttcctgggaaaaatagacgaaagcattctcagaaactgctttttgatatgtgcattcgactcaccgatttgaaactttttttggatagagcagttttgaaacactctgtagaatttgcaagtgtatatttggagctctttgagggctatggcggaaaagaaaatatattcacattaaactagacagcagcattcccagaaacttctttaggatgtttgcagtaaactcacagatttgaacatacctttccgtagagcagctttgaaaaactctgtttgtgggatccgcaagtggatatttggaccgctttgagacctttgctggaaacgggaatatcttcacatataaactggacagaagcattctcagaaacttcttcgtgatgtgcgcattctactcccaaatttgaatcttccttctcatgaagcagttttgaaactctctatttgtgcaatctacaattggataattggaaccctttgatgcccatggtagaaaaggaaatatcctcatataaaaactagacagataaggattcacagaaaatgctttgtgatgtgtgcattcaaatcacggagttgaatctttcttttgttagatcagttttgaaacactgtttctgtggaatctgccagcggacacttggagcgctttgagggctatggtggagaaggaaatatcttcacataaaaactagaaagaagcattctcagaaccatttatgtgaagcgtgccttcaactcacagagttgaaccttccttttgatagaacagttttgaaacactcttttgaacaattgcaggtgaatatttggagggctttgaagcctttgttggaaatgggaatatcttcacacacaaactagccagaagcattctcagaaacttctttgtgatgtgtgcgttgaacccagagagatgaacctttcctttgaaagagcagttttgaaacgtgtttttgtaagatctgcaagcggatggttggcttcgctttgtgtcctttggtggaaacgggaatatcttctaataaaaactagacagaaatattctcagaatcttctttgtgatgtgggcattcaactaacagagttgaacgtttcttttgacagagcagttttgaaacactcttttggtagaatctgccagtggatatttggagcgctttgagggctattgtgccaacggaaatatctgcccctaaaaactagacagaagcattctcagaaactgctttgtgatgtttgcattcaactcacagaggtgaacatacctcttcatagagcagttttgcaaacctctttttgtagaatctgcaagtggatattcggaccactttgaggccttcataggaaacagtaatatcttcacataaaaactagatagaagcattgtcagaaagttctttgtgatgtgtgaattcaactcacagagttgaaccttcctttaatagagcagttttgaaacactctttttctagaatctgcaagtagatacttggagcgctttgaggccttctttggaaaccgggaatatcttcacataaaaagtagatagaggcattctcagaaactttttgtgatatgtagattcaactcacagcgttgaacctttctttggatggagcagttttgaaaaactcttttatcgaatctgcaggtagacattcggggtgctttgagggctgtggtgcaaaaggaaatgtcttcccatagaaactagactgaagcattctcagcaacttcttggtgacgtttgcattcatctcacagtgttgaacatacctttccatagagtggttttgaaacactgtttttgtagaatgggcaagtggatatttggactgctttgaggccttcatcggaaacgggaatatcttcacataaacactagagagaagcattctcagaaacttctttatcatctgtccattcaactcacagagttgaaccttcctttttatggagcagttttgaaacactccttttggagaatctgcaagtggatatttggagcgctttgaggcctatggtagaaaaagaaatatctgcctctaaaaacaagacagaagcattctcacaaagtgctttgtgatatgtgcattcgactcaccgagttgaaacttttttatgatagagcagttttgaaacactctgtagaatctgaaagtggatatttggagctcttcgagggctatggcggaaaagaaaatatattcacattaaactagacagcagcattctcagaaacatctttaggatgtttgcagtaaactcacagagttgaacatacctttccgtaaagcagttttgaaaccctctgtttgtgggatctgcaagtggatatttggaccgctttgagacctttgctggaaatgggaatatcttcacatataaactagacagaagcattctcagaagcttcttcgtgatgtgtgtattctactcccaaatttgaatcttccttttcatgaagcagttttgaaacactctgtttgtacaatccacaattgcataattggaacgctttgatgcccatggtagaaaaggaaatatcctcatataaaaactagacagaaggattcacagaaaatgctttgtgatgtgtgcattcaaatcacggagttgaatctttcttttgttagagcagttttgaaacactgtttctgtggaatctgccagcagacacttggagcgctttgagggctatggtggagaaggaaatatcttcccataaaaactagaaagaagcattctcggaaacatttatgtgaagcgtgcattcaactcacagagttgaacctttcttttgatagaacagttttgaaacactcttttgaacaattgcaggtgaatctttggagcgctttgaaggctttgttggaaatgggaatatcttcacacacaaactagccagaagcattctcagaaacttctttgtgatgtgtgcgttgaacccagagagatgaaactttcctttgatagagcagttttgaaacgtgtttttgtaagatctgcaagcggataattggcttcgctttgtgtcctttggtggaaacgggaatatcttctaataaaatctagacagaaatattctcagaatctcctttgtgatgtgggcattcaactaacacagttgaacatttcttttcacagagcagttttgagacactcttttggtagaatctgccagtggatctttggagcgctttgagggctgttgtgccaatggaaatatctgcccctaaaatctagacagaagcattctcagaaactgcttcgtgatgtttgcattcaactcacagacttgaacatacctcttcatagagcagttttgaaaacctctttttgtagaatctgcaagtggatattcggaccactttgaggccttcataggaaacagtaatatcttcacataaaaactagatagaagcattgtcagaaagttctttgtgatgtgtgaattcaactcacagagttgaaccttccttcaatagagcagttgtgaaacactctttttctagaatctgcaagtagatatttggagcgctttgaggccttcgttggaaaccggaatatcttcacaggaaaagtagatagaggcattctcagaaactttttcgtgatatgtggattcaactcacggcgttgaacctttcttttgatagagcagtgttgtaaaactcttttatcgaatctgcaagtagacatttggagtgctttgggggctgtggtgcaaaaggaaatgtcttcccatagaaactagactgaagcattctcagcaacttctttgtgacgtttgcattcatctcacagtgttgaacatacctttccatagagtagatttgaaacactatttttgtagaatctgcaagtggatatttggactgctttgaggcctccatcggaaacgggaatatattcacataaacactagacagaagcattctcagaaacttctttgtcatctgtccattcaactcacagaattgaaccttcctttttatggagcagttttgaaacactcttttggtagaatctgccagtggatatttggagcgcttggagggctattgtgccaatggaaatatctgcccctgaaaactagacagaagcattctgagaaaagttctttgtgatgtttgcattcaactagcagagttgaaccttccttttgatagggcagtttggaaacactctttttgtagaatcttcatgtggatatctggagcggtttgaggcctacggtcaaaaaggaaatatcttcctgggaaaaatagacgaaagcattctcagaaagtgctttgtgatatgcgcattcgactcaccgagttgaaacttttttttgatacagcagttttgaaacactctgtagaatctgaaagtggatatttggagctctttgagggctatggcggaaaagaaaatatattcacattaaagtagtcagcagcattctcagaaacttctttaggatgtttgcagtaaactcacagagttgaacatacctttccgtagagcagttttgaaacactctgtttgtgggatccgcaagtggatatttggaccgctttgagacctttgctggaaatgggaatatctgcacatttaaactagacagaagcattctcagaaacttcttggtgatgtgtgcattgtactcccaaatttgaatcttccttctcatggagcagttttcaaacactctgtttgtgcaatctacaattggagaattggaaggcttggatgcccgtggtagaaaaggaaatatcctcatataaaaactagacagaaggattcacagaaaatgctttgtgatgtgtgcattcaaatcacggagttgaatctttcttttgtcagagcagttttgaaacactgtttctgtggaatctgccagcggacacttggagcgctttgagggctatggttgagaaggaaatatcttcccataaaaactagaaagaagcattctcagaaacatttatgtgaagcgtgcattcaactcacagagttgaaccttccttttgatagaacagttttgaaacactcttttgaacaattgcaggtgaatctttggagcgctttgaagcctttgttggaaatgggaatatcttcacacacaaactagccagaagcattctcagaaacttctttgtgatgtgtgcgttgaacccagagagatgaacctttccttcgatagagcagttttgaaacgcgtttttgtaagatcggtaagcggataattggcttcgctttgtgtccttcggtggaaacgggaatatcttctaataaaaactagacagaaatattctcagaatctcctttgtgatgtgggcattcaactaacacagttgaacatttcttttcacagagcagttttgaaacactcttttggtagaatctgccagtggatatttggagcgcttggagggctgttgtgccaatggaaatacctgcccctgaaatctggacagaagcattctcagaaactacttcgtgatgtttgcattcaacacacagagttgaacatacctcttcacagagcagttttgaaaacctctttctgtagaatctgtaagtggatattgggaccactttgaggccttcataggaaacagtaatatcttcacataaaaactagatggaagcattctcagaaagttctttgtgatgtgtgaatccaactcacagagttgaaccttcctttaatacagcagtgttgaaacactccttttctagaatctgcaagtagatatttggagcgctttgaggccttcgttggaaaccggaatatcttcacaggaaaagtagatagaggcattctcagaaacttttttgtgatatgttgattcatctgacagcgttgaacctttcctttgatagagcagttttgaaaaactcttttgtcgaatctgcaagtagacatttggagtgctttgaggtctgtggtgccaaaggaaatgtcttcccatggaaactagactgaagcattctcagcaacttctttgtgacgtttgcattcatctcacagtgttgaacatacctttccatagagtagttttgagacactatttttgtagaatctgcaagcggatatttggactgctttgaggccttcatcggagacgggaatatcttcacataaacactaggcagaagcattctcagaaactactttgtgatctgtccattcaactcacagagttgaaccttcctttttatggagcagttttgaaacactgtttttggagaatctgcaagtggatatttggagcgctttgaggcctatggtagaaaaagaaatatctgcctctaaaaactagacagaagcattctgagaaacttctttgtgatgtttgcattcaactaccagagttgaatcttccttttgatagggcagtttggaaacactctttttgtagaatctgcatgtggatatctggagcgatttgaggcctatggtcaaaaaggaaatatcttcctgggaaaaatagacgaaagaattctcagaaactgctttgtgacatgtgcattcgactcaccgtgttgaaactgtttttcgatagagcagttttgaaacactctgtagaatctgaaagtggatatttggagctctttgagggctatggcggaaaagaaaatatattcacattaaagtagacagcagcattctcagaaacttctttaggatgtttgcagtaaactcacagagttgaacatacctttcggtagagcagttttgaaacactgtttgtgggatccgcaagtggatatttgcaccgctttgagacctttgctggaaatgggaatatcttcacatataaactagacggaagcattctcagaaacttcttcgtgatgtgtgcattctactcccgaatttgaatcttccttttcatgaagcagttttgaaacactctgtttgtgcaatccacaagtggataattggaacgctttgatgcgcatggtagaaaaggaaatatcctcatataaaaactagacagaaggattcacagaaaatgctttgtgatgtgtgcattcaaatcacggagttgaatctttcttttgttagagcagttttgaaacactgtttctgtggaatctgccagcggacacttggagcgctttgagggctatggtggagaagggaaatatcttcccataaaaactagagagaagcattctcggaaacatttatgtgaagcgtgcattcaactcacagagttgaacctttcttttgagagaacagttttgaaacactcttttgaacaattgcaggtgaatctttggagcgctttgaaggctttgttggaaatgggaatatcttcacacacaaactagccagaagcattctcagaaacttctttgtgatgtgtgcgttgaacccagagagatgaacctttcctttgatagagcagttttgaaacgtgtttttgtaagatctgcaagcggatagttggcttcgctttgtgtcctttggtggaaacgggaatattttctaataaaaactagacagaaatattctcagaatcttctttgtgatgtgggcattcaactaacacagttgaacctttcttttcacagagcagttttgaaagactcttttggtagaatctgccagtggatatttggagcgctttgagggctattgtgccaatggaaatatcttcccctaaaaactagacagaagcattctcagaaactgctttgtgatgtttgcattcaactcacagagttgaacataccttttcatagagcagttttgaaaacctctttttgtagaatctgcaagaggatattcggaccactttgaggccttcataggaaacagtaatatcttcgcataaaaactagatagaagcattgtcagaaagttctttgtgatgtgtgaaatcaactcacagagttgaaccttcctttaatagagcagttttgaaacactctttttctagaatctgcaagtagatatttggagcgctttgaggccttctttggaaaccggaatatcttcacataaaaagtagatagaggcatgctcagaaacttttctgtcatatgtagattcaactcacagcgttgaacctttcttttgatagagcagttttgaaaaactcttttatcgaatctgcaagtagacatttggagtgctttgagggctgtggtgcaaaaggaaatgtcttcccgtagaaactagactgaagcattctcagcaacttcttggtgacgtttgcattcatctcacagtgttgaacatacctctccatagagtggttttgaaacactgtttttgtagaatcggcaagtggatatttggactgctttgaggccttcatcggaaacgggaatatcttcacataaacactagagagaagcattctcagaaacttctttgtgatctgtccattcaactcacagagttgaaccttcctttttatggagcagttttgaatcactgtttttggagaatctgcaagtggatatttggagtgctttgaggcctatggtagaaaaagaaatatctgcctctaaaaaccagacagaagcattctgagaaacttctttgtgatgtttgcattcaactaccagagttgaatcttccttttgatagggcagtttggaaacactctttttgtagaatctgcatgtggatatctggagcgatttgaggcctacggtccaaaaggaaatatcttcctgggaaaaatagaggaaagcattctcagaaactgctttgtgatatgtgcattcgactcaccgagttgaaactttttttggatagagcagttttgaaacactctgtagaatctgaaggtggatatttggagctctttgagggctatggcggaaaagaaaagatattcacattaaactagacagcagcattctcagagacttcttgaggatgtttgcagtaaactcacagagttgaacatacctttccgtaaagcagttttgaaaccctctgtttgtgggatctgcaagtggatatttggaccgctttgagacctttgctggaaatgggaatatcttcacatataaactagacagaagcattctcagaaacttcttcgtgatgtgtgcattctcctcgcaaatttgaatcttccttttcatgaagcagttttgaaacactctgtttgtgcaatccacaattggataattggaacgctttgatgcccatggtagaaaaggaaatatcctcatataaaaactagacagaaggattcacagaaaatgctttgtgatgtgtgcattcagatcacggagttgaatctttcttttgttagagcagttttgaaacactgtttctgtgcaatctgccagcggacacttggagcgctttgagggctatggtggagaaggaaatatcttcacataaaaactagaaagaaaagcattctcagaaacatttatgtgaagcgtgcattcaactcacagagttgaaccttccttttgatacaacagttttgaaacactcttttgaacaattgcaggtgaatctttggagcgctttgaagcctttgttgcaaatgggaatatcttcacacacaaactagccagaaagcattctcagaaacttctttgtgatgtgtgcgttgaacccagagagatgaacctttcctttgatagagcagttttgaaacgtgtttttgtaagatcggcaagcggataattggcttcgctttgtgtcctttggtggaaacgggaatatcttctaataaaaactagacagaatattctcagaatctcctttgtgatgtgggcattcaactaacacagttgaacatttcttttcacagagcagttttgaaacactcttttggtagaatctgccagtggatacttggagagcttggagggctattgtgccaatggaaatatctgcccctgaaaactagacagaagcattctcagaaactacttcgtgatgtttgcattcaacacacagagttgaacatacctcttcacagagcagttttgaaaacctctttctgtagaatctgcaagtggatattcggaccactttgaggccttcacaggaaacagtaatatcttcacataaaaactagacagaagcattgtcagaaagttctttgtgatgtgtgaattcaactcacagtgttgaaccttcttttcatagagcagttttgaaacactctttttctagaatctgcaagtagatatttggagcgctttgaggccttcgttggaaaccggaatatcttcacataaaaagtagatagaggcattctcagaaacttttttgtgatatgtagattcaactcacagcgttgaacctttcttttgatagagcagttttggaaaactcttttatcgaatctgcaagtagacatttggagtgctttgagggctctggtgcaaaaggaaatgtcttcccatagaaactagactgaaagcattctcagcaacttcttggtgacgtttgcatgcatctcacagtgttgaacatacctttgcatagagcggttttgaaacactatttttgtagaatctgcaagtggatatttggactgctttgaggccttcatcggaaacgggaatatcttcacataaacactagacagaagcattctgagaaacttctttgtgatctgtccattcaactcacagagttgaaccttcctttttatggagcagttttgaatcactgtttttggagaatctgcaagtggatatttggagcgctttgaggcctatggtagaaaaagaaatatctgcctctaaaaaccagacagaagcattccgagaaacttctttgtgatgtttgcattcaactagcagagttgaaccttccatttgatagggcagtttggaaacactctttttgtagaatctgcatgtggatatctggagcggtttgaggcctacggtcaaaaaggaaatatcttcctgggaaaaatagacgaaagcatcctcagtaaactgctttgtgatatgtgcattcgactcactgagttgaaactttttttggatagagcagttttgaaacactctgtagaatctgaaagtggatatttggagctctttgagggctatggcggaaaagaaaatatattcacattaaactagacagcagcattctcagaaacttctttaggatgtttgcagtaaactcacagagttgaacatacctttccgtagagcagttttgaaacactctgtttgtgggatccgcaagtggatatttggaccgatttgagacctttgctgcaaatgggaatatcttcacatataaactagacagaagcattctcagaaacttcctcgtgatgtgtgcattctactcccgaatttgaatcttccttttcatgaagcagttttgaaacactctgtttgtgcaatccacaattggataattggaacgctttgatgcccatggtagaaaaggaaatatcctcatatgaaaactagacagaatgattcacagaaaatgctttgtgatgtgtgcattcaaatcacggagttgaatctttcttttgtcagagcagttttgaaacactgtttctgtggaatctgccagtggacacttggagcgctttgagggctgtggtggagaaggaaatatcttcccataaaaactagaaagaagcattctcagaaacatttatgtgaagcgtgcattcaactcacagagttgaaccttcctttgatacaacagttttgaaacactcttttgaacaattgcaggtgaatctttggagcgctttgaagcctttgttggaaatgggaatatcttcacacgcaaactagccagaagcattctcagaaacttctttgtgatgtgtgcgttgaacccagagagatgaacctttcctttgatagagcagttttgaaacgtgtttttgtaagatctgcaagcggatagttggcttcgctttgtgtcctttggtggaaacggcaatatcttctaataaaaactagagagaaatattctcagaatctactttgtgatgtgggcattcaacttacacagttgaacatttcttttcacagagcagttttgaaacactcttttggtagaatctgccagtggatatttggagcgcttggagggctattgtgccaatggaaatatctgcccctgaaaactagacagaagcattctcagaaactactttgtgatgtttgcattcaactcacagagttgaacatacctcttcatagagcagttttgaaaacccctttttgtagaatctgcaagtggatattcggaccactttgaggccttcataggaaacagtaacatcttcacataaaaactagatagaagcattgtcagaaagttctttgtgatgtgtgaattcaactcacagagttgaaccttcctttaatagagcagttttgaaacactctttttctacaatctgcaagtagatatttggagcgcttggaggccttcgttggaaaccggaatatcttcacaggaaatgtagatagaggcattctcagaaacttttttgtgatatgtagattcaacttacagcgttgaacctttctttggatggagcagttttgaaaaacccttttatcgaatctgcaggtagacatttggggtgctttgagggctgtggtgcaaaaggaaatgtcttcccatagaaactagactgaagcattctcagcaacttctttgtgacgtttgcattcatgtcacagtgttgaacatacctttccatagagtagttttgaagcactatttttgtagaatctgcaagtggatatttggactgctttgaggccttcatcggaaacgggaatatcttcacataaacactagacagaagcattctcagaaacttctttgtggtctgtccattcaactcacagagttgaaccttcctttatatggagcagttttgaaaccctgtttttggagaatctgcaagtggatatttggagcactttgaggcctatggtagaaaaagaaatatctgcctatcacagctagacagaagcattccgagaaacttctttgtgatgtttccattcaactagcagagttgaaccttccttttgatagggcagtttggagacactctttttgtagaatctgcatgtggatatctggagcggtttgaggcctacggtcaaaaaggaaatatcttcctgggaaaaatagacgaaagcattctcagaaagtgctttgtgatatgtgcattcgactcaccaagttgaaacttttttttgatagagaagttttgaaacactctgtagaatctgaaagtggatatttggagctccttgagggctatggcggaaaagaaaatatattcacattaaagtagacagcagcattctcagaaacttctttaggatgtttgcagtaaactctcagagttgaacctacctttccgtagagcagttttgaaacactctgtttgtgggatccgcaagtggatatttggaccgctttgagacctttgctggaaatgggaatatcttcacatataaactagacagaagcattctcagaaacttcttcgtgatgtgtgcattctactcccgaatttgaatcttccttttcatgaagcagttttgaaacactctgttagcgcaatccacaattggataattggaacgctttgatgcccatggtagaaaaggaaatatcctcatataaaaactagacagaaggattcacagaaaatgctttgtgatgtgtgcattcaaatcacggagttgaatctttcttttgttagagcagttttgaaacactgtttctgtggaatctgccagcgtacacttggagcgctttgagggctacggtggagaaggaaatatcttcacataaaaactagaaagacgcattctcagaaacatttatgtgaagcgtgcattcaactcacagagttgaaccttccttttgatagaacagttttgaaacactcttttgaacaattgcaggtgaatctttggagcgctttgaagcctttgttggaaatgggaatatcttcacacacaaactagccagaagcattctcagaaacttccttgtgatgtgtgcgttgaacccagagagatgaaccattcctttgatagagcagttttgaaacgtgtttttgtaagatctgcaagcggatagttggcttcgctttgtgtcctttggtggaaacgggaatatcttctaataaaaactagacagaaatattctcagaatctcctttgtgaagtgggcattcaactaacacagttgaacatttcttttcacagagcagttttgaaacactcttttggtagaatctgccagtggatatttggagcgcttggagggctattgtgccaatggaaatatctgcccctgaaaactagacagaagcattctcagaaactacttcgtgatgtctgcattcaacacacagagttgaacatacctcttcagagagcagttttgaaaacctctttctgtagaatctgcaagtggatattcgggccactttgaggccttcataggaaacagtaatatcttcacataaaaactaaatagaagcattgtcagaaagttctttgtgatgcgtgaattcaactcacagagttgaaccttcctttaatagagcagttttgaaacactctttttctagaatctgcaagtagatatttggagcgctttgaggccttcgttggaaaccggaatatcttcacaggaaaagtagatagaggcattctcagaaacttttttgtgatatgtagattcaactcacagcgttgaacctttctttggatggagcagttttgaaaaactcttttatcgaatctgcaggtagactttcggggtgctttgagagctgtggtgcaaaaggaaatgtcttcccatagaaactagactgaatcattctcagcaacttcttggtgacgtttgcattcatctcacagtgttgaacatacctttgcatagagtagtttggaaacactatttttgtagaatctgcaagtggacatttggactgctttgaggccttcatcggaaacgggaatatcttcacataaacactagacagaatcattctcagaaacttctttgtcatctgtccattcaactcacagagttgaaccttcctttttctggagcagttttgaaacactccttttggagaatctgcaagtggatatttggagcgctttgaggcctatggtagaaaaagaaatatctgcctctaaaaaccagacagaaacattccaagaaacttctctgtgatgtttgcattcaactagcagagttgaaccttccttttgatagggcagtttggaaatactctttttgtagaatctgcatttggatatctggagcggtttgaggcctacggtcaaaaaggaaatatcttcctgggaaaaatagacgaaagcattctcagaaactgctttgtgatatgtgcattcgaatcaccgagttgaaacttttttttcatagagcagttttgaaacactctgtagattctgaaagtggctatttggaggtctttgagggctatggcggaaaagaaaatatattcacattaaactagacagcagcattctcagaaacctctttaggatgtttgcagtaaactcacagagttgaacatacctttccgtagagcagttttgaaacactctgtttgtgggatccgcaaggggatatttggaccgctttgagacctttgctggaaatgggaatatcttcacatataaactagacagaagcattctcagaaacttctttcgtgatgtgtgcattctactcccaaatttgaatcttccttttcatgaagcagttttgaaacactcggtttgtgcaatccacaattggataattggaacgctttgatgcccatggtagaaaaggaaatatcctcatataaaaactagacagaaggattcacagaaaatgctttgtgatgtgtgcattcaaatcacggagttgaatctttcttttgtcagagcagttttgaaacactgtttctgtggaatctgccagcggacacttggagcgctttgaggactatggtggagaaggaaatatcttcccataaaaactagaaagaagcattctcagaaccatttatgtgaagcatgcattcaactcacagagttgaaccttccttttgatagaacagttttgaaacactcttttgaacaattgcaggtgaatatttggagggctttgaagcctttgttggaaacgggaatatcttcacacacgaactagccagaagctttctcagaaacttctttgtgatgtgtgcgttgaacccagagagatgaacctttcctttgatagagcagttttgaaacgtgtttttgtaagatctgcaagcggatagttggcttcgctttgtgtcctttggtggaaacgggaatatcttctaataaaaactagacagaaatattctcagaatcttctttgtgatgtgggcattcaactaacagagttgaacgtttcttttcacagagcagttttgaaactctcttttggtagaatctgccagtggatatttggagcgctttgagggctattgtgccaacggaaatatctgcccctaaaaactagacagaagcattctcagaaactacttcgtgatgtttgcattcaacacacagagttgaacataccccttcccagagcagttttgaaaacctctttctgtagaatctgcaagtggatattcggaccactttgaggccttcataggaaacagtaatatcttcacataaaaactaaaaagaagcattgtcagaaagttctttgtgatgtgtgaattcaactcacagagttgaaccttcctttaatagagcagttttgaaacactctttttctagaatctgcaagtagatatttggagcgctttgaggccttcgttggaaactggaatatcttcacaggaaaagtagatagaggcattctcagaaacttttttgtgatatgtagattcaactcacagcgttgaacctttctttggatggagcagttttgaaaaactcctttatcgaatctgcaggtagacatttggggtgctttgagggctgtggtgcaaaaggaaatgtcttcccatagaaactagactgaagcattctcagcaacttcttggtgacgtttgcattcatctcacagtgttgaacatacgtttccatagagtggttttgaaacactgtttttgtagaatcggcaagtggatatttggactgctttcaggccttcatcggaaacgggaatatcttcacataaacactagagagaagcattctcagaaacttctttgtcatctgtccattcaactcacagagttgaaccttcctttttatggagcagttttgaaacactccttttggagaatctgcaagtggatatttggagcgctttgaggcctatggtagaaaaagaaatatctgcctctaaaaaccagacaaaagcattctgagaaacttctttgtgatgtttgcattcaaataccagcagttgaaccttccttttgatagggcagtttggaaacattctttttgtagaatctgcatgtggatatctggagcgatttgaggcctacggtcaaaaaggaaatatcttcctgggaaaaatagacgaaagcattctcagaaagtgctttgtgatatgtgcattcggctcaccgatttgaaacctttttttgatagagcagttttaaaacacactgtagaatctgaaagtggatatttggagctctttgagggctatggcggaaaagaaaatatattcacattaaagtagacagccagcattctcagaaacttctttaggatgtttgcagtaaactcacagagttgaacatacctttccgtagagcagttttgaaacactctgtttgtgggatccgcaagtggatatttggaccgctttgagacctttgctggaaatgggaatatcttcacgtataaactagacagagcattctcagaaacttcttggtgatgtgtgcattgtactcccaaatttgaatcttccttctcatggaacagttttgaaacactctgtttgtgcaatatacaattggagaattggaacgcttggatgcccgtggtagaaaaggaaatatcctcatataaaaactagacagaaggattcacagaaaatgctttgtgatgtgtgcattcaaatcacggagttgaatctttcttttgtcagagcagttttgaaacactgtttctgtggaatctgccagcggacacttggagcgctttgagggctatggtggagaaggaaatatcttcccataaaaactagaaagaagcattctcggaaacatttatgtgaagcgtgcattcaactcacagagttgaaccttccttttgatagaacagttttgaaacactcttttgaacaattacaggtgaatctttggagcgctttgaagcctttgttggaaatgggaatatcttcacacacaaactagccagaagcattctcagaaacttcttcgtgatgtgtgcgttgaacccagagagatgaacctttccttcgatagagcagttttgaaacgtgcttttgtaagatctgcaagcgcataattggcttcactttgtgtcctttggttgaaacgggaatatcttctaataaaaactagacagaaatattctcagaatctcctttgtgatgtgggcattcaactaacacagttgaacatttcttttcacagagcagttttgaaacactcttttggtagaatctgccagtggatacttggagcgcttggagggctattgtgccaatggaaatatctgcccctgaaaactagacagaagcattctcagaaactgctttgtgatgtttgcattcaactcacagagttgaacataccttttcatagagcagttttgaaaatatctttttgtagaatctgcaagtggatattcggaccagtttgaggccttcataggaaacagtaatatcttcacataaaaactagatagaagcattgtcagaaagttctttgtgatgtgtgaattcaacccacagagttgaaccttcctttaatagagcagttttgaaacactctttttctagagtctgcaagtagatatttggagcgctttgaggccttctttggaaaccggaatatcttcacataaaaagtagatagaggcattctcagaaacttttttgtgatatgttgattcatctgacagcgttgaacccttcttttgatagagcagttttgaaaaactcttttgtcgaatctgcaagtagacatttggagtgctttgagggctgtggtgccaaaggaaatgtcttcccatggaaactagactgaagcattctcagcaacttctttgtgacgtttgcattcatctcacagtgttgaacatacctttccatagagtagttttgagacactatttttgtagaatctgcaagtggatatttggactgctttgaggccttcatcggagacgggaatatcttcacataaacactagacagaagcattctcagaaacttctttgtcatctgtccattcaactcacagagttgaaccttcctttttatggagccgttttgaaacactccttttggagaatctgcaagtggatatttggagcgctttgaggcctatggtagaaaaagaaatatccgcccctaaaaaccagacagaagcattctgagaaacttctttgtgatgtttgcattcaactaccagagttgaaccttccttttgatagggcagtttggaaacactctttttgtagaatctgcatgtggatatctggagcgatttgaggcctacagtcaaaaaggaaatatcttcctgggaaaaatagacgaaagcattctcagaaactgctttctgatatgtgcattcgactcaccgagttgaaacttttttttgatagagaagttttgaaacactctgtagaatctgaaagtggatatttggagctctttgagggctatggcggaaaagaaaatatattcacattaaactagacagcagaattcccagaaaattctttaggatgtttgcagtaaactcacagagttgaacatacctttccgtagagcagttttgaaacactctgtttgtgggatccgcaattggattttggaccgctttgagacctttgctggaaacgggaatatcttcacatataaactagacagaagcattctcagaaacttcttcatgatgtgtgcattctactcccgaatttgaatcttccttttcatgaagcagttttgaaacactctgtttgtgcaatccacaattggataattggaacgctttgatgcccatggtagaaaaggaaatatcctcatataaaaactagacagaaggattcacagaaaatgctttgtgatgtgtgcattcaaatcacgcagttgaatctttcttttgttagagcagttttgaaacactgtttctgtggaatctgccagcggacacttgtagcgctttgagggctatggtggagaaggaaatatcttcacataaaaactagaaagaagcattctcagaaccatttatgtgaagcgtgcgttcaactcacagagttgaaccttccttttgatagtacagttttgaaacactcttttgaacaattgcaggtgaatatttggagggctttgaagcctttgttggaaatgggaatatcttcacacacaaactagccagaagcattctcagaaacttctttgtgatgtgtgcgttgaacccagagagatgaacctttcctttgatagagcagttttgaaacgtgcttttgtaagatcggcaagcggataattggcttcgctttgtgtcctttggtggaaacgggaatatcttctaataaaaactagacagaaatattctcagaatcttctttgtgatgtgggcattcaactaacacagttgaacgtttcttttcacagagcagttttgaaacactcttttggtagaatctgccagtggatatttggagcgctttgagggctattgtgccaatggaaatatcttcccatagaaactagacagaagcattctcagaaactacttcgtgatgtttgccttcaactcacagagttgaacatacctcttcatagagcagttttgaaaacctctttctgtagaatctgcaagtggatattcggaccactttgaggccttcataggaaacagtaatatcttcacataaaaactagatagaagcattgtcagaaagttctttgtgatgtgtgaattcaactcacagagttgaaccttcctttaatagagcagttttgaaacactctttttctagaatctgcaagtagatatttggagcgctttgaggccttcgttggaatccggaatatcttcacataaaacgtagatagaggcattctcagaaacttttttgtgatatgtagattcaactcacagcgttgaacctttcttttgatacagcggttttcaaaaactcttatgtcgaatctgcaagtagacatttggagtgctttgagggctgtggtgcaaaaggaaatgtcttcccatagaaactagactgaatcattctcaacaacttccttgtgacgtttgcattcatctcacagtgttgaacataccttttcatagagcagttttgaaacactctttttgtagaatctgcaattggatatttggactgcgttgaggccttcactggaaacgggaatatctacacataaacactagacagaagcattctgagaaacttctttgtgatctgtccattcaactcacagagttgaaccttcctttttatggagccgttttgaaacactgtttttgtagaatctgcaagtggatatttggagcgctttgaagcctatggtagagaaagaaatatctgcatatcaaaactagacagaagcattccgagaaacttctctgtgatgtttgcattcaactagcagagttgaaccttccttttgatagggcagtttggaaacactctttttgtagaatctgcatgtggatatctggagcggtttgaggcctacggtcaaaaaggaaatatcttcctgggaaaaatagacgaaaagcattctcagaaactgctttgtgatatgtgcattcgactcaccgagttgaaacttttttttgatacagcagttttgaaacactctgtagaatctgaaagtggatatttggagctctttgagggctatggcggaaaagaaaatatattcacattaaagtagacagcagcattctcagaaacttctttaggatgtttgcagtaaactcacagagttgaacctacctttccgtagagcagttttgaaacactctgtttgtgggatccgcaagtggatatttggaccgctttgagacatttgctggaaatgggaatatcttcacatataaactagacagaagcattctcagaaacttcttcgtgatgtgtgcattgtactcccaaatttgaatcttccttctcatggagcagttttgaaacactctgtttgtgcaatctaccattggagaataggaacgcttggatgcccgtggtagaaaaggaaatatcctcatataaaaactagacagaaggattcacagaaaatgctttgtgatgtgtgcattcaaatcatggagttgaatctttcttttgttagagcagttttgaaacactgtttctgtggaatctgccagcggacacttggagcgctttgagggctatggtggagaaggaaatatcttcacataaaaactagaaagaagcattctcggaaacatttatgtgaagcgtgccttcaactcacagagttgaaccttccttttgatagaacagttttgaaacactcttttgaacaattgcaggtgaatctttggagcgctttgaagcctttgttggaaatgggaatatcttcacacacaaactagccagaagcattctcagaaacttctttgtgatgtgtgcgttgaacccagagagatgaacctttcctttgatagagcagttttgaaacgtgtttttgtaagatctgcaagcggataattggctttgctttgtgtcctttggtggaaacgggaatatcttctaataaaaactagacagaaatattctcagaatcttctttgtgatgtgggcattcaactaacacagttgaacgcttcttttcacagagcagttttgaaacactcttttggtagaatctgccagtggatatttggagcgctttgagggctattgtgccaatggaaatatctgcccttaaaactagacagaagcattctcagaaactacttcatgatgtttgcattcaacacacagagttgaacatacctcttcacagagcagttttgaaaacctctttctgtagaatctgcaagtggatattcggaccactttgaggccttcataggaaacagtaatatcttcacataaaaactagatagaagcattgtcagaaagttctttgtgatgtgtgaattcaactcacagagttgaaccttcctttaatagagcagttttgaaacactcttcttctagaatctgcaagtagatatttggagcgctttgaggccttcgttggaaaccggaatatcttcacagaaaaagtagatagaggcattctcagaaacttttttgtgatatgttgattcatctgacagcgttgtacctttcttttgatagagcagttttgaaaaactcttttgtcgaatctgcaagtagacatttggagtgctttgagggctgtggtgcaaaaggaaatgtcttcccatggaaactagactgaagcattctcagcaacttcttggtgacgtttgcatgcatctcacagtgttgaacatacctttccatagagtggttttgaaacactgtttttgtagaatcggcaagtggatatttggactgctttgaggccttcatcggaaacgggaatatcttcacataaacactagagagaagcattctcagaaacttctttgtcatctgtccattcaactcacagaggtgaaccttcctttttatggagcagttttgaaacactgtttttggagaatctgcaagtggatatttggagcgctttgaggcgtatggtagaaaaagaaatatctgcctctaaaaaccagacagaagcattccgagaaacttctttgtgatgtttgcattcaactagcagagttgaaccttccttttgatagggcagtttggaaacactctttttgtagaatctgcatgtggatatctggagcggtttgaggcctacggttaaaaaggaaatatcttcctgggaaaaatagacgaaagcattctcagaaacttctttgtgatatgtgcattcgactctccgagttgaaactttttttggatagagcagttttgaaacactctgtagaatctgaaagtggatatttggagctctttgagggctatggcggaaaagaaaagatattcacattaaactagacagcagcattctcagaaacttctttaggatgtttgcagtaaactcacagagttgaacctacctttccgtagagcagttttgaaacactctgtttgtgggatccgcaagtggatatttggaccgctttgagacctttgctggaaatgggaatatctgcacatataaactagacagaagcattctcagaaacttcttggtgatgtgtgcagtctcctcccgaatttgaatcttccttttcatgaagcagttttcaaacactctgtttgtgcaatccacaattggataattggaacactttgatgcccatggtagaaaaggaaatatcctcatataaaaactagacagaaggattcacagaaaatgctttgtgatgtgtgcattcaaatcacggagttgaatctttcttttgtcagagcagttttgaaacactgtttctgtggaatctgactgcggacacttggagcgctttgagggctatggtggagaaggaaatatcttcccataaaaactagaaagaagcattctcggaaacatttatgtgaagcgtgccttcaactcacagagttgaaccttccttttgatagaacagttttgaaacactcttttgaacaattgcaggggaatctttggagcgctttgaagcctttgttggaaatgggaatatcttcacacacaaactagccagaagcattctcagaaacttctttgtgatgtgtgcgttgaacccacagagatgaacctttcctttgatgcagcacttttgaaacgtgtttttgtaagatcggcaagcggataactggcttcgctttgtgtcctttggtggaaacgggaatatcttctaataaaaactagacagaaatattctcagaatctcctttgtgatgtgggcattcaactaacacagttgaacatttcttttcagagagcagttttgaaacactcttttggtagaatctgccagtggatatttggagcgctttgagggctgttgtgccaatggaaatatctgcccctaaaatctagacagaagcattctcagaaactgctttgtgatgtttgcattcaactcacagagttgaacatacctttacatagagcagttttgaaaacctctttttgtagaatctgcaagaggatattcggaccactttgaggccttcataggaaacagtaatatcttcacataaaaactagatagaagcattgtcagaaagttctttgtgatgtgtgaattcaactcacagagttgaaccttcctttaatagagcagttttgaaatactctttttctagaatctgcaactagatatgtggagcgctttgaggccttctttggaaaccggaatatcttcacataaaaagtagatagaggcattctcagaaacttttttgtgatatgtagattcaactcacagcgttgaacctttctttggatggagtagttttgaaaaactcttttatcgaatctgcaggtagacatttggggtgctttgagggctgtggtgcaaaaggaaatgtcttcccatagaaactagactgaaagcattctcagcaacttctttgtgacgtttgcattcatctcacagtgttgaacatacctttccatcgagtacttttgaaacactgtttttgtagaatctgcaagtggatatgtggactgctttgaggccttcatcggaaacgggaatatcttcacataaacactagagagaagcattctcagaaactactttgtgatctgtccattcaactcacagagttgaaccttcctttttatggagcagttttggatcactgtttttggagaatctgcaagtggatatttggagcgctttgaggcctatggtagaaaaagaaatatctgcctctaaaaaccagacagaagcattccgagaaacttctttgtgatgtttgcattcaactagcagagttgaaccttccttttgatagggcagttttgaaacactctttttgtagaatctgcatgtggatatctggagcggtttgaggcctacggtcaaaaaggaaatatcttcctgggaaaaatagacgaaagcattctcagaaactgctttgtgatatgtgcattcgactcaccgagttgaaacttttttttgatagagcagttttgaaacactctgtagaatctgaaagtggatagttggagctctttgagggctatggcggaaaagaaaatatattcacattaaagtagacagcagcattctcagaaacttctttaggatgtttgtagtaaactcacagagttgaacatacctttccgtagagcagttttgaaacactctgtttgtggtatccgcaagtggatatttggaccgctttgagacctttgctggaaatgggaatatcttcacatataaactagacagaagcattctcagaaacttcttcgtgatgtgtgcattctactcccgaatgtgaatcttccttttcatgaagcagttttgaaacactctgtttgtgcaatccacaattggataattggaacgctttgatgcccatggtagaaaaggaaatatcttcatataaaaactagacagaaggattcacagaaaatgctttgtgatgtgtgcattcaaatcatggagttgaatctttcttttgttagagcagttttgaaacactgtttctgtggaatctgccagtggacacttggagcgctttgagggctatggtggagaaggaaatatcttcccataaaaactagaaagaagcattctcagaaacatttatgtgaagcgtgcattcaactcacagagttgaaccttccttttgatacaacagttttgaaacactcttttgaacaattgcaggtgaatctttggagcgctttgaagcctttgttgcaaatgggaatatcttcacacacaaactagccagaagcattctcagaaacttctttgtgatgtgtgcgttgaacccagagagatgaacctttccttggatagagcagttttgaaacgtgtttttgtaagatctgcaagcggataattggcttcgctttgtgtcctttggtggaaacgggaatatcttctaataaaaactagacagaaatattctcagaatctcctttgtgatatgggcattcaactaacacagttgaacatttcttttcacagagcagttttgaaacactcttttggtagaatctgccagtggatatttggagcgcttggagggctattgtgccaatggaaatatctgcccctgaaaactagacagaagcattctcagaaactgctttgggatgtttgcattcaactcacagcagttgaacatacctctgcatagagcagttttgaaaacctctttttgtagaatctgcaagtggatattcggaccactttgaggccttcataggaaacagtaatatcatcacataaaaactagatagaaacattgtcagaaagttctttgtgatgtgtgaattcaactcacagagttgaaccttcctttaatagagcagttttgaaacactctttttctagaatctgccagtagatatttggagcgctttgaggccttcgttggaaaccggaatatctccacataaaaagtagatagaggcattctcagaaacttttttgtgatatgtagattcaacttacagcgttgaacctttctttggatggagcagttttgaaaaacccttttatcgaatctgcaggtagacaattggggtgctttgagggctgtggtgcaaaaggaaatgtcttcccatagaaactagactgaagcattgtcagcaacttcttggtgacgtttgcattcatctcacagcgttgaacatacctttccatagagtggttttgaaacactgtttttgtagaatcggcaagtggatatttggactgctttcaggccttcatcagaaacgggaatatcttcacataaacactagagagaagcattctcagaaacttctttgtgatctgtccattcaactcacagagttgtaccttcctttttctggagcagttttgaaacactccttttggagaatctgcaagtggatatttggagcgctttgaggcctatggtagaaaaagaaatatctgcctctaaaaaccagacagaagcattccgagaaacttctttgtgatgtttgcattcaactagcagagtggaaccttccttttgatagggcagtttggaaacactctttttgtagaatctgcatgtggatatctggagcggtttgaggcctacggtcaaaaaggaaatatcttcctgggaaaaatagacgaaagcattctcagaaagtgctttgtgatatgtgcattcgactcaccgagttgaaacttttttttgatagagcagttttgaaacactctgcagaatctgaaagtggatatttggagctctttgagggctatggcggaaaagaaaatatattcacattaaagtagacagcagcattctcagaaacttctttaggatgtttgcagtaaactcacagagttgaacatacctttccgtagagcagttttgaaacactctgtttgtgggatccgcaaggggatatttggaccgctttgagacctttgctggaaatgggaatatcttcacgtataaactagacagaagcattctcagaaacttcctcgtgatgtgtgcattcttctcccgaatttgaatcttccttttcatgaagcagttttgaaacactctgtttgtgcaatccacaattggataattggaacgctttgatgcccatggtagaaaacgaaatatcctcatataaaaattagacagaaggattcagagaaaatgctttgtgatgtgtgcattcaaatcacggaggtgaatctttgttttcttagagcagttttgaaacactgtttctgtggaatctgccagcggacacttggagcgctttgagggctatggtggagaaggaaatatcttcacataaaaactagaaagaagcattctcagaaacatttatgtgaagcgtgcattcaactcacagagttgaaccttccttttgatacaacagttttgaaacactcttttgaacaattgcaggtgaatctttggagcgctttgaagcctttgttggaaatgggaatatcttcacacacaaaccagccagaaacattctcagaaacttctttgtgatgtgtgcgttgaacccagagagatgaacctttcctttgatagagcagttttgaaacgtgtttttgtaagatcggcaagcggataattggcttcgctttgtgtcctttggtggaaacgcgaatatcttctaataaaaactagacagaaatattctcagaatcttctttgtgatgtgggcattcaacaaacacagttgaacatttcttttcacagagcagttttgaaacactcttttggtagaatctgccagtggatatttggagcgctttgagggctattgtgccaatggaaatatctgcccctaaaaactagacagaagcattctcagaatctacttcgtgatgtttgcattcaacacagagagttgaacatacctcttcacagagcagttttgaaaacctctttctgtagaatctgcaagtggatattcggaccactttgaggccttcataggaaacagtaatatcttcacataaaaactagatagaagcattgtcagaaagttctttgtgatgtgtgaattcaactcacagagttgaaccttcctttaatagagcagttttgaaacactctttttctagaatctgcaagtagatatttggagcgctttgaggccttcgttggaaaccggaacatcttcacataaaaagtagatagaggcattctcagaaaattttgtgatatgtagattcatctgacagcgttgaacctttcttttgatagagcagttttcaaaaactcttttgtcgaatctgcaagtagacatttggagtgctttgagggctgtggtgccaaaggaaatgtcttcccatagaaactagaatgaagcattctcagcaacttctttgtgacgtttgcattcatctcacagtgttgaacatacctttccatagagtagttttgaagcactatttttgtagaatctgccagtggatatttggactgctttgaggccttcatcggaaacgggaatatcttcacataaacactagacagaagcattctcagaaacttcttggtgatctgtccattcaactcacagagttgaaccttcctttttatggagcagttttgaaacattgtttttggaggatctgcaagtggatatttagagcgctttgaggcctatggtagaaaacgaaatatctgcctataacaactagacagaagcattctgagaaacttctttgtgatgtttgcattcaactaccagagttgaaccttccttttgatagggcagtttggaaacactctttttgtagaatctgcatgtggatatctggagcgatttgaggcctacggtccaaaaggaaatatcttcctgggaaaaatagacgaaagcattctcagaaagtgctttgtgatatgtgcattcgactcaccgagttgaaacttttttttgatagagcagttttgaaacactctgtagaatctgaaagtggatatttggagctctttgagggctatggcggcaaagaaactatattcacattaaagtagacagcagcattcccagaaacttctttaggatgtttgcagtaaactcacaggagttgaacacacctttccgtagagcagctttgaaacactctgtgtgtgggatccgcaagtggatatttggaccgctttgagacctttgctggaaacgggaatatcttcacatataaactggacagaagcattctcagaaacttcttcgtgatgtgtgcattctactcccaaatttgaattttccttttcatgaagcagttttggaacactctatttgtgcaatctacaattggataattggaacgctttgatgcccatggtagaaaaggaaatatcctcatataaaaactagacagaaggattcacagaaaatgctttgtgatgtgtgcattcaaatcatgcagttgaatctttcttttgttagagcagttttgaaacactgtttctgtggaatctgccagcggacacttggagcgctttgagggctatggtggagaaggaaatatcttcacataaaaactagaaagaagcattctgagaaccatttatgtgaagcgtgcgttccactcacagagttgaaccttccttttgatagaacagttttgaaacactcttttgaacaattgcaggtgaatatttggagggcttttaagcctttgttggaaatgggaatatcttcacacacaaactagccagaagcattctcagaaacttctttgtgatgtgtgcgttaaacccagagagatgaacctttcctttgatagagcagttttgaaacgtgtttttgtaatatcggcaagcggataattggcttcgctttgtgtcctttggtggaaacgggaatatcttctaataaaaactagacagaaatattctcagaatcttctttgtgatgtgggcattcaacaaacacagttgaacatttcttttcacagagcagttttgaaacactcttttggtagaatctgccagtggatatttggagcgctttgaaggctattgtgccaatggaaatatcttcccctaaaaactagacagaagcattctcagaaactacttcatgatgtttgcattcaacacacacagttgaacatacctcttcacagagcagttttgaaaacctctttctgtagaatctgtaagtggatattgggaccactttgaggccttcataggaaacagtaatatcttcacataaaaactagatggaagcattctcagaaagttctttgtgatgtgtgaattcaactcacagagttgaaccttccttcaatagagcagttttgaaacactctttttctagaatctgcaagtagatatttggagcgcgttgaggccttcgttggaaaccggaatatcttcacaggaaaagtagatagaggcattctcagaaacttttttgtgatatgtagattcaactcacagcgttgaacctttctttggatggagcagttttgaaaaacccttttatcgaatctgcaggtagacattcggggtgctttgagggctgtggtgcaaaaggaaatgtcttcccatagaaactagactgaagcattctcagcaacttcttggtgacgtttgcattcatctcacagtgttgaacatacctttccatagagtgattttgaaacactgtttttgtagaatcggcaagtggatatttggactgctttgaggccttcatcggaaacgggaatatcttcacataaacactacagagaagcaatctcagaaacttctttgtggtctgtccattcaaatcacagagttgaaccttcctttttatggagcagttttggaaccctgtttttggagaatctgcaagtggatatttggagcgctttgaggcctatggtagaaaaagaaatatctgcctatgacaactagacagaagcattctgagaaacttctttgtgatgtttgcattcaactaccagaggtgaaccttccttttgatagggcagtttggaaacactctttttgcagaatctgcatgtggatatctggagcgatttgaggcctacggtccaaaaggaaatatcttcctgggaaaaatagacgaaagcattctcagaaactgctttgtgatatgtgcattcgactcaccgagttgaaactttttttggatagagcagttttgaaacactctgtagaatctgaaagtggatatttggagctactttgagggctatggcggaaaagaaaatatattcacattaaactagacagcagcattcccagaaacttctttaggatgtttgcagtaaactcacagagttgaacatacctttccgtagagcagctttgaaacactctgtgtgtgggatccgcaagtggatatttggaccgctttgagacctttgctggaaatgggaatatcttcacatataaactggacagaagcattctcagaaacttcttcgtgatgtgtgcattctcctcccgaatttgaatcttccttttcatgaagcagttttgaaacactctgtttgtgcagtccacaattggataattggaacgctttgatgtccaaggtagaaaaggaaatatcctcatataaaaactagacagaaggattcacagaaaatgctttgtgatgtgtgcattcaaatcacggagttgaatctttcttttgttagagcagttttgaaacactgtttctgtggaatatgccagcggacacttggagcgctttgagggctacggtggagaaggaaatatcttcacataaaaactagaaagaagcattctcagaaccatttatgtgaagcgtgcattcaactcacagagttgaaccttccttttgatagaacagttttgaaacactcttttgaacaattgcaggtgaatatttggagggctttgaagcctttgttggaaacgggaatatcttcacacacgaactagccagaagcattctcagaaacttctttgtgatgtgtgcgttgaacccagagagatgaacctttcctttgatagagcagttttgaagcgtgtttttgtaagatcggcaagcggataattggcttcgctttgtgtcccttggtggaaacgggaatatcttctaataaaaactagacagagatattctcagaaacttctttgtgatgtgggcattcaactgacacagtcgaacatttcttttcacagagcagttttgaaacactcttttggtcgaatctgccagtggatatttggagcgctttgagggctattgtgccaatggaaatatctgcccctaaaaactagacagaagcattctcagaaactgcttcgggatgtttgcattcaactcacagagttgaatatacctctgcatagagcagttttgaaaacctctttttgtagaatctgcatgtggatattcggaccactttgaggccttcatgggaaacagtaatatcttcacataaaaactagatagaagcattgtcagaaagttctttgtgatgtgtgaattcaactcacagagttgaaccttcctttaatagagcagttttgaaacactctttttctagaatctgcaagtagatatttggagcgctttgaggccttcgttggaaaccggaatatcttcacaggaaaagaagatagaggcattctcagaaacttttttgtgatatgtagattcaactcacagcgttgaacctttctttggatggagcagttttgaaaaactcttttatcgaatctgcaggtagacatttggggtgctttgagggctgtggtgcaaaagaaaatgtcttcccatagaaactagactgaagcattctcagcaacttctttgtgacgtttgcattcatctcacagtgttgaacatacctttccatagagtagttttcagacactatttttgtagaatctgcaagcggatatttggactgctttgaggccttcatcggagacgggaatatcttcacataaacactaggcagaagcattctcagaaacttctttgtgatctgtccattcaactcacagagttgaaccttcctttttatggagcagttttgaatcactgtttttggggaatctgcaagtggatatttcgagcgctttgaggcctatggtagaaaaagaaatatctgcctctaaaaaccagacagaagcattccgagaaacttctctgtgatgtttgcattcaactagcagagttgaaccttcctcttgatagggcagtttggaaacactctttttgtagaatctgcatgtggatatctggagcggtttgaggcctacggtcaaaaaggaaatatcttcctgggaaaaatagacgaaagcattctcagaaactgctttgtgacatgtgcattcgactcaccgtgttgaaactgtttttcgatagagcagttttgaaacactctgtagaatctgaaagtggatatttggagctctttgagggctatggcggaaaagaaaatatattcacattaaagtagacagcagcattctcagaaacttctttaggatgtttgcagtaaactcacagagttgaacatacctttccgttaagcagttttgaaacactctgtttgtgggatccgcaagtggatatttggaccgctttgagacctttgctggaaatgggaatatcttcacatataaactagacagaagcattctcagaaacttcttcgtgatgtgtgcattctactcccgaatttgaatcttccttttcatgaagcagttttgaaacactctgtttgtgcaatccacaattggataattggaacgctttgatacccatggtagaaaaggaaatagcctcatataaaaactagacagaaggattcacagaaaatgctttgtgatgtgtgcattcaaatcacgcagttgaatctttcttttgttagagcagttttgaaacactgtttctgtggaatctgccagcggacacttggagcgctttgagggctatggtggagaaggaaacatcttcccataaaaactagaaagaagcattctcggaaacatttatgtgaagcgtgcattcaactcacagagttgaaccttccttttgatggaacagttttgaaacactcttttgaacaattgcaggtgaatctttggagcgctttgaagcctttgttggaaatgggaatatcttcacacacaaactaggcagaagcattctcagaaacttctttgtgatgtgtgcgttgaacccagagagatgaacctttcctttgatagagcagttttgaaacgtgtttttgtaaggtcggcaagcggataattggcttcgcttagtgtcctttggtggaaacgggaatatcttctaataaaaactagacagaaatattctcagaatcttctttgtgatgtgggcattcaactaacagagttgaacgtttcttttcacagagcagttttgaaacactcttttggtagaatctgccagtggatatttggagcgctttgagggctattgtgccaacggaaatatctgcccctaaaaactagacagaagcattctcagaaactacttcgtgatgtttgcattcaacacacagagttgaacatacctcttcacagagcggttttgaaaaactctttctgtagaatctgcaagtggatattcggaccactttgaggccttcataggaaacagtaatatcttcacataaaaactagatagaagcattgtcagaaaattccttgtgatgtgtgaattcaactcacagagttgaaccttcctttaatagagcagttttgaaacactcttcttctagaatctgcaagtagatatttggagcgctttgaggccgtcgttggaaaccggaatatcttcacagaaaaagtagatagaggcattctcagaaactcttttgtgatatgttgattcatctgacagcgttgaacctttcttttgatagagcagttttgaaaaactcttttgtcgaatctgcaagtagacatttggagtgctttgagggctgtggtgccaaaggaaatgtcttcccatggaaactagactgaagcattctcagcaacttctttgtgacgtttgcattcatctcacagtgttgaacatacctttccatagagtagttttgagacactatttttgtagaatctgcaagcggatatttggactgctttgaggccttcatcggagacgggaatatcttcacataaacactagacagaagcattctcagaaacctctttgtggtctgtccattcaactcacagagttgaaccttcctttttatggagcagttttgaaaccctgtttttggagaatctgcaagtggatatttggagcgctttgaggcctatggtagaaaaagaaatatctacctatgacaactagacagaagcattctcagaaactgctttgtgatatgtgcattcgactcaccgagttgaaacttttttttgattgagcagttttgaaacactctgtagaatctgaaagtggatatttggagctctttgagggctatggcggaaaacaaaatatattcacattaaagtagacagcagcattctcagaaacttctttaggatgtttgcagtaaactcacagagttaaacatatctttccgtagagcagttttgaaacactctgtttgtgggatccgcaagtggatatttgggcccctttgagacctttgctagaaatgggaatatcttcacatataaactagacagaagcattctcagaaacttcttcgtgatgtgtgcattgtactcccaaatttgaatcttccttctcatggagcagttttgaaacactctgtttgtgcaatctaccattggagaattggaacgcttggatgcccgtggtagaaaaggaaatatcctcatataaaaactagacagaaggattcacagaaaatgctttgtgatgtgtgcattcaaatcacggagttgaatctttcttttgtcagagcagttttgaaacactgtttctgtggaatctgccagcggatacttggagcgctttgagggctgtggtggagaaggaaatatcttcccataaaaactagaaagaagcattctcagaaacatttatgtgaagcgtgcattcaacttacagagttgaaccttccttttgatacaacagttttgaaacactcttttgaacaattgcaggtgaatctttggagcgctttgaagcctttgttggaaatgggaatatcttcacacacaaactagccagaagcattctcagaaacttctttgtgatgtgtgcgttgaacccagagagatgaacctttccttcgatagagcagttttgaaacgtgtttttgtaagatctgcaagcggataattggcttcgctttgtgtcctttggtggaaacgggaatatcttctaataaaaactagacagaaatattctcagaatcttctttgtgatgtgggcaatcaactaacacagttgaacgtttcttttcacagagcagttttgaaacactcttttggtagaatctgccagtggatatttggagcgctttgagggctattgtgccaacggaaatatctgcccctaaaaactagacagaagcattctcagaaactacttcgtgatgtttgcattcaacacacagagttgaacatacctcttcacagagcagttttgaaaaactctttctgtagaatctgcaagtggatattcggaccactttgaggccttcataggaaacagtaatatcttcacataaaaactagatagaagcattgtcagaaagttctttgtgatgtgtgaattcaactcacagagttgaaccttcctttaatagagcagttttgaaacactctttttctagaatctgcaagtagatatttggagcgctttgaggccttcgttggaaactggaatatcttcacataaaaagtagatagaggcattctcagaaacttttttgtgatatgttgattcatctgacagcgttgaacctttcttttgatagagcagttttgaaaaactcttttgtcgaatctgcaagtagacatgtggagtgctttgagggctgtggtgccaaaggaaatgtcttcccatggaaactagactgaagcattctcagcaacttcttggtgacgtttgcattcatctcacagtgttgaacatacctatccatagagtggttttgaaacactgtttttgtagaatcggcaagtggatatttggactgctttgaggccttcatcggaaacgggaatatcttcacataaacactagagagaagcattctcagaaacttctttgtcatctgtccattcaactcacagaggtgaaccttcctttttatggagcagttttgaaacactgtttttggagaatctgcaagtggatatttggagcgctttgaggcctatggtagaaaaagaaatatctgcctctaaaaaccagacagaagcattctgagaaacttctttgtgatgtttgcattcaactaccagagttgaatcttccttttgatagggcagtttggaaacactctgtttgtagaatctgcatgtggatatctggagcgatttgaggcctatggtcaaaaaggaaatatcttcctgggaaaaatagacgaaagcattctcagaaactgctttgtgatatgtgcattcgactcaccgagctgaaacttttttttgatagagcagttttgaaacactctgtagaatctgaaagtggatatttggagctctttgagggctatggcggaaaagaaaatatattcacattaaactagacagcagcattctcagaaacttctttaggatatttgcagtaaactcacagagttgaacatacctttccgaagagcagttttgaaacactctgtttgtgggatccgcaagtggatatttggaccgctttgagacctttgctggaaatgggaatatcctcacatataaactagacagaagcattctcagaaacttcttcgtgatgtgtgcattctactcccaaatttgaatcttccttttcatgaagcagttttgaaacactctatttgtgcattctacaattggatgattggaacgctttgatgcccatggtggaaaaggaaatatcctcatataaaaactagacagaaggattcacagaaaatgctttgtgatgtgtgcattcaaatcacggagttgaatctttcttttgttagagcagttttgaaacactgtttctgtggaatctgccagcggacacttggagcgctttgagggctacggtggagaaggaaatatcttcacataaaaactaaaaagaagcattctcagaaacatttatgtgaagcgtgcattcaactcacagagttgaaccttcctttggatacaacagttttgaaacactcttttgaacaattgcaggtgaatctttggagcgctttgaagcccttgttggaattgggaatatcttcacacacaaactagccagaagcattctcagaaacttctttgtgatgtgtgcgttgaacccagagagatgaacctttccttggatagagcagttttgaaacgtgtttttgtaaggtctgcaagcggataattggcttcgctttgtgtcctttggtggaaacgggaatatcttctaataaaaactagacagaaatattctcagaatctcctttgtgatgtgggcattcaactaacacagttgaacatttcttttcacagagcagttttgaaacactcttttggtagaatctgccagtggatatttggagagcttggagggctgttgtgccaatggaaatatctgcccctaaaatctagacagaaagcattctcagaaactactttgtgatgtttgcattcaactcacagagttgaacatacctcttcatagagcagttttgaaaacctctttttgtagaatctgcaagtggatattcggaccactttgaggccttcataggaaacagtaataccttcacataaaaactagatagaagcattgtcagaaagttctttgtgatgtgtgaattcaactcacagagttggaccttcctttaatagagcagttttgaaacactctttttctagaatctgcaagtggatatttggagcgctttgaggccttcgttggaaaccggaatatcttcacaggaaaagtagatagaggcattctcagaaacttttctgtgatatgtagattcaactcacagcgttgaacctttctttggatggagcagttttgaaaaacccttttatcgaatctgcaggtagacatttggggtgctttgagggctgtggtgcaaaaggtaatgtcttcccatagaaactagactgaagcattctcagcaacttcttggtgacgtttgcattcatctcacagtgttgaacatacctctccatagagtggttttgaaacactctttttgtagaatcggcaagtggatatttggactgctttgaggccttcatcggaaacgggaatatcttcacataaacactagagagaagcattctcagaaacttctttgtggtctgtccattcaactcacagagttgaaccttcctttttatggagcagttttgaaaccctgtttttggagaatctgcaagtggatatttggagcgctttgaggcctatggtagaaaaagaaatatctgcctatgacaactagacagaagcattctgagaaacttctttgtgatgtttgcattcaactaccagagttgaaccttccttttgatagggcagtttggaaacactctctttgtagaatctgcatgtggatatctggagcgatttgaggcctacggtccgaaaggaaatatcttcctgggaaaaatagacgaaagcattctcagaaactgctttgtgatatgtgcattcgactcaccgagttgaaacttttcttggatagagcagttttgaaacactctgtagaatctgaaagtggatatttggagctctttgagggctatggcggaaaagaaaatatattcacattaaactagacagcagcattctcagaaacttctttaggatgtttgcagtaaactcacagatttgaacatacctttccgtagagcagttttgaaacactctatttgtgggatccgcaagtggatatttggaccgctttgagacctttgctggaaatgggaatatcttcacgtataaactagacagaagcattctcagaaacttcttcatgatgtgtgcattctactcccaaatttgaatcttccttttcatgaagcagttttgaaacactcggtttgtgcaatccacaattggataattggaacgctttgatgcccatggtagaaaaggaaatatcctcatataaaaactagacagaaggattcacagaaaatgctttgtgatgtgtgcattcaaatcacggagttgaatctttcttttgtgagagcagttttgaaacactgtttctgtggaatctgccagcggacacttggagcgctttgagggctatggtggagaaggaaatatcttcccataaaaactagaaagaagcattctcagaaacatctatgtgaagtgtgcattcaactcacagatttgaaccttcctttttcatagaacagttttgaaacactcttttgtacaattttaggtgaatatttggagctctttgaagcctttgttggaattgggaatatcttcacatacaaactagccagaagcattctcagaaacttctttgtgatgtgtgcgttgaactcagagagatgaacctttcctttgatagagcagttttgaaacgtgtttctgtaagatctgtatgtggatatttggggcgctttgagtcctttggtggaaacgggaatatcttctaataaaaactagacagagatattctcagaaacttctttgtgatgtgggcattcaactgacacagtcgaacgtttcttttcacagagcagttttgaaacactcttttggtcgaatctgccagtggatatttggagcgctttgagggctattgtgccaatggaaatatctgcccctaaaaactagacagaagcattctcagaaacttctttgtgatgtttgcattcaaataccagagttgaacctccctcttcatagagcagttttgaaatcctctttttgtagaatctgcaagtggatatttggaccactttgaggccttcataggaaacagtactatcttcacataaaaactagatagaagcattgtcagaaagttctttgtgatgtgtgaattcaactcacagagttgaaccttcctttaatagagcagttttgaaacgctctttttctagaatctgccagtagatatttggagcgctttgaggccttcgttggaaacaggaatatcttcacataaaaagtagatagaggcattctcagaaacttttttgtgatatgtagattccactcacagcgttgaacctttcttttgatagagcagttttgaaaaattcttttatcgaatctgcaagtagacatttggggtgctttgagggctgtggtgcaaaaggaaatgtcttcccatggaaactagactgaagcattctcagcaacttctttgtgacgtttgcattcatctcacagtgttgaacatacctttccatagagtagttttgaagcactatttttgtagaatctgcaagtggatatttggactgctttgaggccttcatcggagacgggaatatcttcacataaacactagacagaagcattctcagaaacttctttgtgatctgtccattcaactcacagagttgaaccttcctttttatggagcagttttgaaacactgtttttggagaatcttcaagtagatatttggagcgctttgtggcctatgttagaaaaagaaatatctgcctataacaactagacagaagcattctgagaaacttctttgtgatgtttgcattcaactaccttagttgaaccttccttttgatagggcagtttggaaacactctttttgtagaatctgcatgtggatatctggagcgatttgaggcctatggtcaaaaaggaaatatcttcctgggaaaaatagacgaaagcattctcagaaactgctttgtgatatgtgcattcgactcaccgatttgaaacttttttttgatagagcagttttgaaacactctgtagaaactgaaagtggatattaggagctctttgagggttatggcggaaaagaaaatatattcacattaaactagacagcagcattcccagaaacttctttaggatgtttgcagtaaactcacagagttgaacatacctttccgtagagcagttttgaaacactctgtttgtgggatccgcaagtggatatttggaccgctttgagacctttgctggaaacgggaatatgttcacatataaactagacagaagcattctcagaaacttcttcgtgatgtatgcattctactccctaatttgaatcttccttttcatgaagcagttttgaaacactctatttgtgcattctacaattggatgattggaacgctttgatgcccatggtagaaaaggaaatatcctcatataaaaactagacagaaggattcacagaaaatgctttgtgatgtgtgcattcaaaccacggagttgaatctttcttttgttagagcagttttgaaacactgtttctgtggaatctgccagcggacacttggagcgctttgagggctatggtggagaaggaaacatcttcccataaaaactagaaagaagcattctgagaaccatttatgtgaagcgtgcattcaactcacagagttgaaccttccttttgatagaacagttttgaaacactcttttgaacaattgcaggtgaatatttggagggctttgaagcctttgttggaaatgggaatatcttcacacacaaactagccagaagcattctcagaaacttctttgtgatgtgtgcgttgaatccagagagatgaacctttcctttgatagagcagttttgaaacgtgtttttgtaagatctgcaaacggataattgacttcgccttgtgtcctttggtggaaacgggaatatcttctaataaaaactagacagaaatattctcagaatctcctttgtgatgtgggcattcaactaacgcagttgaacatttcttttcacagagcagttttgaaacactcttttggtagaatctgccagtggatatttggagcgctttgagggctgttgtgccaatggaaatatctgcccctaaaatctagacagaagcattctcagaaactacttcgtgatgtttgcattcaactcacagagttgaacatacctcttcacagagcagttttgaaaacctccttttgtagaatctgcaagtggatattcggagcactttgaggccttcataggaaacagtaatatcttcgcataaaaactagatagaagcattgtcagaaagttctttgtgatgtgtgaattcaactcacagagttgaaccttcctttaatagagcagttttgaaacactctttttttagaatctgcaagtagatatttcgagcgctttgaggccttcgttggaaaccggaatatcttcacaggaaaagtagatagaggcattctcagaaacttttttgtgatatgttgattcatctgacagcgttgaacctttcttttgatagagcagttttgaaaaactcttttgtcgaatctgcaagtagacatttggagtgctttgagggctgtggtgccaaaggaaatgtcttcccatggaaactagactgaagcattctcagcaacttcttggtgacgtttgcattcatctcacagtgttgaacatacctttccatagagtggttttgaaacactgtttttgtagaatcggcaagtggatatttggactgctttgaggccttcgtcggaaacgggaatatcttcacataaacactagagagaagcattctcagaaacttctttgtcatctgtccattcaactcacagaagttgaaccttcctttttatggagcagttttgaaacactccttttggagaatctgcaagtggatatttggagcgctttgaggcctatggtagaaaaagaaatatctgcctctaaaaaccagacagaaagcattctgagaaacttctttgtgatgtttgccttcaactaccagagttgaaccttccttttgatagggcagtttggaaacactctttttgtagaatctgcatgtggatatctggagcgatttgaggcctacggtccaaaaggaaatatcttcctgggaaagatagacgaagcattctcagaaactgctttgtgatatgtgcattcgactctccgagttgaaacttttttcggatagagcagttttgaaacactctgtagaatctgaaagtggatatttggagctctttgagggctatggcggaaaagaaaagatattcacattaaactagacagcagcattcccagaaacttctttaggatgtttgcagtaaactcacagagttgaacacacctttccgtagagcagttttgaaacactctgtttgtgggatccgcaagtggatatttggaccgctttgagacctttgctggaaacgggaatatcttcacatataaactggacagaagcattctcagaaacttcttcgtgatgtgtgcattctactcccaaatttgaatcttccttttcatgaagcagttttgaaacaatctgtttgtgcaatccacaattggataattggaacgctttgatgcccatggtagaaaaggaaatatcctcatataaaaactagacagaaggatccacagaaaatgctttgtgatgtgtgcattcaaatcacggagttgaatctttcttttgtcagagcagttttgaaacactgtttctgtggaatctgccagcggacacttggagcgctttgagggctatggtggagaaggaaatatcttcccataaaaactagagagaagcattctcagaaccatttatgtgaagcgtgcgttcaactcacggagttgaaccttccttttgatagaacagttttgaaacactcttttgaacaattgcaggtgaatatttggagggctttgaagcctttgttggaaatgggaatatcttcacacacaaactagccagaagcattctcagaaacttctttgtgatgtgtgcgttgaacccagagagatgaacctttcctttgatagagcagttttgaaacgtgtttttgtaagatctgcaagcggatagttggcttcgctgtgtgtcctttggtggaaacgggaatatcttctaataaaaactagacagaaatattctcagaatcttcttcgtgatgtgggcattcaactaacacagttgaaccttacttttcacagagcagttttgaaacacccttttggtagaatctgccagtggatatttggagcgctttgagggctattgtgccaacggaaatatctgcccctaaaaactagacagaagcatgctcagaaactgctttgtgatgtttgcattcaactcacagagttgaacataccttttcatagagcagttttgaaaacctctttttgtagaatctgcaagaggatattcggaccactatgaggccttcataggaaacagtaatatcttcacgtaaaaactagatagaaacattgtcagaaagttctttgtgatgtgtgaattcaactcacagagttgaaccttcctttaatagagcagttttgaaacactctttttctagaatccgccagtagatatttggagcgctttgaggccttcgttggaaaccggaatatctccacataaaaagtagatagaggcattctcagaaacttttttgtgatatgtagattcaactcacagcgttgaacctttctttggatggagcagttttgaaaaactcttttatcgaatctgcaggtagacatttgtggtgctttgagggctgtggtgcaaaaggaaatgtcttcccatagaaactagactgaagcattctcagcaacttcttggtgacgtttgcattcatctcacagtgtttaacatacctttccatagagtagttttgaaacactgtttttgtagaatcggcaagtggatatttggactgctttgaggccttcatcggaaacgggaatatcttcacataaacactagagagaagcattctcagaaacttctttgtgatctgtccattcaactcacagagttgaaccttcctttttatggagcagttttgaaacactgtttttggagaatctgcaagtagatatttggagcgctttgtggcctatggtagaaaaagaaatatctgcctataacaactagacagaagcattctgagaaacttctttgtgatgtttgcattcaactaccagaggtgaaccttccttttgatagggcagtttggaaacactcatttggagaatctgcatgtggatatctggagcgatttgaggcctactgtccaaaaggaaatatcttcctgggaaaaatagacgaaagcattctcagaaactgctttgtgatatgtgcattcgactcaccgagttgaaacttttatttgatagagcagttttgaaacactctgtagaatctgaaagtggatatttggagctctttgagggctatggcggaaaagaaaatatattcacattaaactagacagcagcattctcagaaacttctttaggatgtctgcagtaaactcacagagttgaacatacctttccgtagagcagttttgaaacactctgtttgtgggatccgcaagtggatatttggacctctttgagatctttgctggaaatgggaatatcttcacatataaactagacagaagcattctcaaaaacttcttcgtgatgtgtgcattgttctcccaaatttgaatcttccttctcatggagcagttttgaaacactctgtttgtgcaatctacaattggagaattggaacgcttggatgcccgtggtagaaaaggaaatatcctcatataaaaactagacagaaggattcacagaaaatgctttgtgatgtgtgcattcaaatcacggagttgaatctttcttttgtcagagcagttttgaaacactgtttctgtggaatctgccagcggacacttggagcgctttgagggctatggtggagaaggaaatatcttcccataaaaactagagagaagcattctcagaaacatgtatgtgaagcgtgaattcaactcacagtgttgaaccttccttttgatagaacagtttttaaacactcttttgaacaattgcaggtgaatctttggagcgctttgaagcctttgttggaaatgggaatatcttcacacacaaactagccagaagcattctcagaaacttctttgtgatgcgtacgttgaacacagagagatgaacctttcctttgatagagcagttttgaaacgtgtttttgtaagatctgcaagcggataatcggcttcgctttgtgtcctttggtggaaacgggaatatcttctaataaaaactagacagaaatattctcagaatctcctttgtgatgtgggcattcaactaacacagttgaactttcttttcacagagcagtttagaaacactcttttggtagaatctgccagtggatatttggagcgctttgagggctattgtgccaatggaaatatctgcccctgaaatctagacagaagcattctcagaaactacttcgtgatgtttgcattcaactcacagagttgaacatacctcttcatagagcagttttgaaaacctctttttgtagaatctgcaagaggatattcggaccactttgaggccttcataggaaacagtaatatcttcgcataaaaactagatagaagcattgtcaggaagttctttgtgatgtgtgaattcaactcacagagttgaaacttcctttaatagagcagtgttgaaacactctttttctagaatctgcaagtagatatttggagcgcttggaggccttcgttgtaaaccggaatatcttcacaggaaatgtagatagaggcattctcagaaacttttttgtgatatgtagattcaactcacagcgttgaacctttctttggatggagcagttttgaaaaactcttttatcgaatctgcaggtagacattcggggtgctttgagggctgtgctgcaaaaggaaatgtcttcccatagaaactagactgaagcattctcagcaacttcttggtgacgtttgcattcatctcacagtgttgaacatacctttccatagagtagttttgaaacactgtttgtgtagaatcggcaagtggatatttggactgctttgaggccttcatcggaaacgggaatatcttcacataaacactagagagaagcattctcagaaacttctttgtggtctgtgcattcaactcacagagttgaaccttcctttttatggagcagttttgaaaccctgttttcggagaatctgcaagtggatatttggagcgctttgaggcctatggtagaaaaagaaatatctgcctatgacagatagacagaagcattccgagaaaagttctttgtgatgtttgcattcaactagcagagttgaaccttccttttgatagggcagtttggaaacactctttttgtagaatcttcatgtggatatctggagcggtttgaggcctacggtcaaaaaggaaatatcttcctgggaaaaatagacgaaagcattctcagaaactgctttgtgatatgtgcattcgactcaccgagttgaaacttttttttgatagagcagttttggaacactctgtagaatctgaaagtgtatatttggagctctttgagggctatggcggaaaagaaaatatattcacattaaactagacagcagcattctcagaaacttctttaggatgtttgtagtaaactcacagagttgaacatacctttccgtagagcagttttgaaacactctgtttgtgggatccgcaaggggatatttggaccgctttgagacctttgctggaaatgggaatatcttcacatataaactagacagaagcattctcagaaacttcttcgtgatgtgtgcattgtactcccaaatttgaatcttccttctcatggagcagttttgaaacactctgtttgtgcaatctacaattggagaattggaaggcttggatgcccatggtagaaaaggaaatatcctcatataaaaactagacagaaggattcacagaaaatgctttgtgatgtgtgcattcaaatcacggagttgaatctttcttttgttagagcagttttgaaacactgtttctgtggaatctgccagcggacacttggagcgctttgagggctatggtggagaaggaaatatcttcacataaaaactagaaagaagcattctcagaaacatttatgtgaagcgtgcgttcaactcacagagttgaaccttccttttgatagaacaggtttgaaacactcttttgaacaattgcaggtgaatatttggagggctttgaagcctttgttggaaatgggaatatcttcacacacaaactagccagaagcattctcagaaacttctttgtgatgtgtgcattgaacccagagagatgaacctttcctttgatagagcagttttgaaacgtgtttttgtaagatctgcaagcggataattggcttcgctttgtgtcctttggtggaaacgggaatatcttctaataaaaactagacagaaatattctcaaaatctcctttgtgatgtgggcattcaactaacacagttgaacatttcttttcacagagcagttttgaaacactcttttggtagaatctgccagtggatatttggagcgcttggagggctattgtgccaatggtaatatctgcccctgaaaactagacagaagcattctcagaaactgctttgtgatgtttgcattcaactcacagagttgaacctacctcttgatagagcagtttggaaaacctcttcttgtagaatctgcaagtggatattcggaccactttgaggccttcataggaaacaataatatcttcacataaaaactagatagaagcattgtcagaaagttctttgtgatgtgtgaattcaactcacagagttgaaccttcctttaatagagcagttttgaaacactctttttctagaatctgcaagtagatatttggagccctttgaggccttctttggaaaccggaatatcttcacataaaaagtagatagaggcattctcagaaacttttttgtgaaatgtagattcaactcacagcgttgaacctttctttggatggagcagttttgaaaaacccttttatcgaatctgcaggtagacattcggggtgctttgagggctgtggtgcaaaaggaaatgtcttcccatagaaactagactgaagcattctcagcaacttctttgtgacgtttgcattcatctcacagtgttgaacatacctttccatagagtagttttgagacactatttttgtagaatctgcaagtggatatttggactgctttgaggccttcatcggagacgggaatatcttcacataaacactaggcagaagcattctcagaaacttctttgtgatctgtccattcaactcacagagttgaaccttcctttttatggagcagttttgaaacactgtttgtgaagaatctgcaagtggatatttgcagcgccttgaggccaatggtagaaaaagaaatatctgcctctaaatactagactgaagcattctgagaaacttctttgtgatgtttgctttcagctaccagagttgaaccttccttttgatagggcagtttggaaacactctttttgtagaatctgcatgtggatatctggagcgatttgaggcctacggtcaaaaaggaaatatcttcctgggaaaaatagacgaaagcattctcagaaagtgctttgtgatatgcgcattcgactcaccgagttgaaacttttttttgatagagcagttttgaaacactctgtagaatctgaaagtggatatttggagctctttgagggctatggcggaaaagaaaatatattcacattaaagtagacagcagcattctcagaaacttctttaggatgtttgcagtaaactcacagagttgaacatacctttccgtagagcagttttgaaacactctgtttgtgggatccgcaagtggatatttggaccgctttgagacctttgctggaaatgggaatatctgcacatataaactagacagaagcattctcagaaacttcttcgtgatgtgtgcattctcctcccgaatttgaatcttccttttcatgaagcagttttgaaacactctgtttgtgcaatccacaattggataattggaacgctttgatgcccatggtagaaaaggaaatatcctcatataaaaactagacagaaggattcacagaaaatgctttgtgatgtgtgcattcaaatcacggagttgaatctttcttttgttagagcagttttgaaacactgtttctgtggaatctgccagcggacacttggagcgctttgagggctatggtggagaaggaaatatcttcccataaaaactagacagaagcattctcagaaccatttatgtgaagcgtgcattcaactctcagagttgaaccttccttttgttagaacagttttgaaacactcttttgaacaattgcaggtgaatatttggagcgctttgaagcctttgctggaaatgggaatatcttcacgcacaaagtagccagaagcattctcagaaacttctttgtgatgtgtgcgttgaacccagagagatgaacctttcctttgatagagcagttttgaaacgtgtttttgtaaggtcggcaagcggataattggcttcgctttgtgtcctttggtggaaacgggaatatcttctaataaaaactagacagaaatattctcagaatctcctttgtgatgtgggcattcaactaacacagttgaacatttcttttcacagagcagttttgaaacactcttttggtagaatctgccagtggatatgtggagcgcttggagggctattgtgccaatggaaatatctgcccctgaaaactagacagaagcattctcaaaaactgctttgtgatgtttgcattcaactcacagagttgaacatacctcttcatagagcagttttgaaaacctctttttgtagaatctgcaagtggatattcggaccactttgaggccttcatcggaaacagtaatatcatcacataaaaactagatagaagcattgtcagaaagttctttgtgatgtgtgaattcaactcacatagttgaaccttcctttaatagagcagttttaaacactctttttctagaatctgccagtagatatttggagcgctttgaggccttcgttggaaaccggaatatcttcacataaaaagtagatagaggcattctcagaaacttttctgtgatatgtagattcaactcacagcgttgaacctttcttttgatagagcggttttgaaaaactcttatgtcgaatctgcaagtagacatttggagtgctttgagggctgtggtgcaaaaggaaatgtcttcccatagaaactagactgaagcattctcagcaacttctttgtgacgtttgcattcatctcacagtgttgaacatacctttccatagagtagttttgaaacactgtttttgtagaatctgcaagtggatatttggactgctttgaggccttcatcggaaacgggaatatcttcacataaacactagagagaagcattatcagaaacttctttgtggtctgtccattcaactcacagagttgaaccttcctttttatggagcagttttgaaacactgttttcggagaatctgcaagtggatatttggagcgctttgaggcctatggtagaaaaagaaatatctgcctatgacaactagacagaagcattctgagaaacttctttgtgatgtttgcattcaactaccagaggtgaaccttccttttcatagggcagtttggaaacactctttttgtagaatctgcatgtggatatctggagcgatttgaggcctacggtccaaaaggaaatatcttccggggaaaaatagacgaaagcattctcagaaactgctttgtgatatgtgcattcgactctccgagttgaaactttttttggatagagcagttttgaaacactctgtaggatctgaaagtggatatttggagctctttgagggctatggcggaaaagaaaatatattcacattaaactagacagcagcattctcagaaacttctttaggatgtttgtagtaaactcacagagttgaacatacctttccgtagagcagttttgaaacactctgtttgtgggatccgcaagtggatatttggaccgctttgagacctttgctggaaatgggaatatcttcacatataaactagacagaagcattctcagaaacttcttcgtgatgtgtgcattctactcccaaatttgaatcttccttctcatgaagcagttttgaaacactctatttgtgcaatctacaattggataattggaaccctttgatgcccatggtagaaaaggaaatatcctcatatgaaaactagacagaaggattcacagaaaatgctttgtgatgtgtgcattcaaatcacggagttgaatctttcttttgttagagcagttttgaaacacagtttctgtggaatctgccagcggacacttggagcgctttgagggctacggtggagaaggaaatatcttcacataaaaactagaaagaagcattctcagaaacatttatgtgaagcgtgcattcaactcacagagttgaaccttccttttgatacaacagttttgaaacactctttggaacaattgcaggtgaatctttggagcgctttgaagcctttgttgcaaatgggaatatcttcacacacaaactagccagaagcattctcagaaacttctttgtgatgtgtgcgttgtacccagagagatgaacctttccttcgatagagcagttttgaaacgtgtttttgtaagatcggcaagcggataattggcttcgctttgtgtcctttggtggaaacgggaatatcttctaataaaaactagacagagatattctcagaaacttctttgtgatgtgggcattcaagtaacacagttgaacatttcttttcacagagcagttttgaaacactcttttggtcgaatctgccagtggatatttggagtgctttgagggctattgtgccaatggaaatatctgcccctaaaaactagacagaagcattctcagaaactgcttcgtgatgtttgcattcaacacacagagttgaacatacctcttcacagagcagttttgaaaacctctttctgtagaatctgcaagtggatattcggaccactttgaggccttcataggaaacagtaatatcttcacataaaaactagatagaagcattgtcagaaagttctttgtgatgtgtgaattcaactcacagaattgaaccttccttcagcagagcagttgtgaaacactctttttctagaatctgcaagtagatatttggagcgctttgaggccttcgttggaaaccggaatatcttcacaggaaaagtagatagaggcattctcagaaacttttttgtgatatgtagattcaactcacagcgttgaacctttctttggatggagcagttttgaaaaattctttaatcgaatctgcaggtagacatttggggtgctttgagggctgtggtgcaaaaggaaatgtcttcccatagaaactagactgaagcattctcagcaacttctttgtgacgtttgcattcatctcacagtgttgtacatacctttccatcgagtacttttgaaacactgtttttgtagaatctgcaagtggatatttggactgctttgaggccttcatcggaaacgggaatatcttcacataaacactagagagaagcattctcagaaacttctttgtcatctgtccattcaactcacagagttgaaccttcctttttatggagcagttttgaaacactccttttggagaatctgcaagtggatatttggagcactttgaggcctatggtagaaaaagaaatatctgcctctaaaaaccagacagaagcattccgagaaactcctttgtgatgtttgcattcaactagcagagttgaaccttccttttgatagggcagtttggaaacactctttttgtagaatctgcatgtggatatctggagcggtttgaggcctacggtcaaaaaggaaatatcttcctgggaaaaatagacgaaagcattctcagaaactgctttgtgatatgtgcattcgactcaccgagttgaaacttttttttgatagagcagttttgaaacactctgtagaatctgaaagtggatatttggagctctttgagggctatggcggaaaagaaaatatattcacattaaagtagacagcagcattctcagaaacttctttaggatgtctgcagtaaactcacagagttgaacatacctttccatagagcagttttgaaacactctgtttgtgggatccgcaagtggatatttggacagctttgagatctttgctggaaatgggaatatcttcacatataaactagacagaagcattctcagaaacttcttcgtgatgtgtgcattctactcccaaatttgaatcttccttctcatgaagcagtttggaaacactctatttgtgcaatctacaattggataattggaaccctttgatgcccatggtagaaaaggaaatatcctcatataaaaactagacagaaggattcacagaaaatgctttgtgatgtgttcattcaaatcacggtgttgaatcttattttgttagagcagttttgaaacactgtttctgtggaatctgcccgcggacacttggagcgctttgagggctatggtggagaaggaaatatcttcacataaaaactagaaagaagaattctcggaaacatttatgtgaagcgtgcattcaactcacagagttgaacctttcttttgatagaacagttttgaaacactcttttgaacaattgcaggtgaatctttggagcgctttgaagcctttgttggaaatgggaatatcttcacacacaaactagccagaagcattctcagaaacttctttgtgatgtgtgcgttgaacccagagagatgaacctttccttcgatagagcagttttgaaacgtgtttttgtaagatcggcaagcggataattggcttcgctttgtgtcctttggtggaaacgggaatatcttctaataaaaactagacagaaatattctcagaatctcctttgtgatgtgggcattcaactaacacagttgaacatttcttttcacagagcagttttgaaacactcttttggtagaatctgccagtggatatttggagtgtttggagggctattgtgccaatggaaatatctgccactgaaatctagacagaagcattctcagaaactacttcgtgatgtttgcattcaacacacagagttgaacataccccttcacagagcagttttgaaaacctctttctgtagaatctgcaagtggatattcggaccactttgaggccttcataagaaacagtaatatcttcacataaaaactagatagaagcattgtcagaaagttctttgtgatgtgtgaattcaactcacagaattgaaccttccttcaatagagcagttgtgaaacactctttttctagaatctgcaagtagatatttggagcgctttgaggccttcgttggaaaccggaatatcttcacaggaaaagtagatagaggcattctcagaaactttttcgtgttatgtggattcaactcacagcgttgaacatttcttttgatagagcagttttgtaaaactcttttatcgaatctgcaagtagacatttggagtgctttgagggctgtggtgcaaaaggaaatgtcttcccatagaaactagactgaagcattctcatcaacttctttgtgacgtttgcattcatctcacagtgttgaacattcctttccatagggtagttttgaagcactatttttgcagaatctgcaagtggatatttggactgctttgaggccttcatcggaaacgggaatatcttcacataaacactagacagaagcattctcagaaacttctttgtggtctgtccattcaactcacagagttgaaccttcctttttatggagcagttttgaaacactgttttcggaggatctgcaagtggatatttggagcgctttgaggcctattgtagaaaaagaaatatctgcctatgacaactagacagaagcattccgagaaacttctctgtgatgtttgcattcaactagcagagttgaaccttccttttgatagggcagtttggaaacactctttttgtagaatctgcatgtggatatctggagcggtttgaggcctacggtcaaaaaggaaatatcttcctgggaaaaatagacgaaagtattctcagaaactgctttgtgatatgtgcattcgactcaccgagttgaaactttttttggatagagcagttttgaaacactctgtagaatctgaaggtggatatttggagctctttgagggctatggcggaaaagaaaagatattcacattaaactagacagcagcattctcagaaacttctttaggatgtttgcggtaaactcacagagttgaacctacctttccatagagcagttttgaaacactctgtttgtgggatccgcaagtggatatttggaccgctttgaggcctttgctggaaatgggaatatcttcacatataaactagacagaagcattctcagtaacttcttcgtgatgtgtgcattctactcccgaatttgaatcttccttttcatgaagcagttttgaaacactctgtttgtgcaatccacaattggataattggaacgctttgatgcccatggtagaaaaggaaatatcctcatataaaaactagacacaaggattcacagaaaatgctttgtgatgtgtgcattcaaatcacggagttgaatctttcttttgtcagagcagttttgaaacactgtttctgtggaatctgccagcggacacttggagcgctttgagggttgtggtggagaaggaaatatcttcccataaaaactagaaagaagcattctcagaaccatttatgtgaagcgtgcattcaactcacagagttgaaccttccttttgatagaacagttttgaaacactcttttgaacaattgcaggtgaatatttggagggctttgaagcctttgttggaaacgggaatatcttcacacacaaactagccagaagcattctcagaaacttctttgtgatgtgtgcgttgaacccagagagatgaacctttcctttgatagagcagttttgaaacgtgtttttgtaagatctgcaagcggataattggcttcgctttgtgtcctttgttggaaacgggaatatcttctaataaaaactagacagaaatattctcagaatcttctttgtgatgtgggcattcaactaacagagttgaacatttcttgtgacagagcagttttgaaacactctttttgtagaatctgccagtggatatttggagcgctttgagggctttgtagaaatggaaaagtcttcacctaaaaactagacagaagcattctcagaaactgcttcgggatgtttgcattcaactcacagagttgaatatacctctgcatagagcagttttgaaaacctctttttgtagaatctgcaagtggatattcggaccactttgaggccttcatgggaaacagtaatatcttcacataaaaactagatagaagcatagtcagaaagttctttgtgatgtgtgaattcaaatcacagaattgaaacttcctttaatagagcagttttgaaacactctttttctagaatctggaagtagatatttggagcgctttgaggccttcgttggaaaccggaatatcttcacataaaaagcagatagaggcattctcagaaactttttcgtgatatgtggattcaactcacagcgttgaacctttcttttgatagagcagttttgtaaaactcttttatcgaatctgcaagtagacatttggagtgctttgagggctgtggtgcaaaaggaaatgtcttcccatagaaactagattgaagcattctcagcaacttcttggtgacgtttgcattcatctcacagtgttgaacatacctttccatagagtggttttgaaacactgtttctgtagaatctgcaagtggatatttggactgctttgaggccttcatcggaaacgggaatatcttcacataaacactagagagaagcattctcagaaacttctttgtggtctgtccattcaactcacagagttgaaccttcctttttatggagcagttttgaaacactgttttcggaggatctgcaagtggatatttggagcgctttgaggcctacggtagaaaaagaaatatctgcctatgacaactagacagaagcattctgagaaacttctttgtgatgtttgcattcaactagcagagttgaaccttccttttgatagggcagtttggaaacactctttttgtagaatctgcatgtggatatctggagcgatttgaggcctacggtcaaaaaggaaatatcttcctgggaaaaatagacgaaagcattctcacaaagtgctttgtgatatgtgcattcgactcaccgagttgaaacttttttttgatagagcagttttgaaacactctgtagaatctgaaagtggatatttggagctctttgagggctatggcggaaaagaaaatatattcatattaaactagacagcagcattctcagaaacctctttaggatgtttgcagtaaactcacagagttgaacatacctttccgtagagcagttttgaaacactctgtttgtgggatccgcaagtggatatttggaccgctttgagacctttgctggaaatgcgaatatctgcacatataaactagacagaagcattctcagaaacttcttcgtgatgtgtgcattctactcccaaatatgaatcttccttttcatgaagcagttttgaaacactctatttgtgcattctacaattggatgattggaacgctttgatgcccatggtagaaaaggaaatatcctcatataaaaactagacagaaggattcacagaaaatgctttgtgatgtgtgcattcaaatcacggagttgcatctttcttttgtgagagcagttttgaaacactgtttctgtggaatctgccagcggacacttggagcgctttgagggctatggtggagaaggaaatatcttcccataaaaactagaaagaagcattctcggaaacatttatgtgaagcgtgcattcaactcacagagttgaacctttcttttgagagaacagttttgaaacactcttttgaacaattgcaggtgaatctttggagcgctttgaagcctttgttggaaatgggaatatcttcacacacaaactagccagaagtattctcagaaacttctttgtgatgtgtgcgttgaacccagagagatgaacctttccttggatagagcagttttgaaacgtgtttttgtaagttctacaagcggataattggcttcgctttgtgtcctttggtggaaacgggaatatcttctaataaaaactagacagaaatattctcagaatctcctttgtgatgtgggcattcaactaacacagttgaacatttcttttcacagagcagttttgaaacactcttttggtagaatctgccagtggatatttggagcgcttggagggctattgtgccaatggtaatatctgcccctgaaaactagacagaagcattctcagtaaactgctttgtgatgtttgcattcaactcacagagttgaacataccttttcatagagcagttttgaaaacctctttttgtagaatctgcaagaggatattcggaccactttgaggccttcataggaaacagtaatatcttcgcataaaaactagatagaagcattgtcagaaagttctttgtgatgtgtgaattcaactcacagagttgaaccttcctttaatagagcagttttgaaacactccttttctagaatctgcaagtagatatttggagcgctttgaggccttcgttggaaaccggaatatcttcacaggaaaagtagatagaggcattctcagaaacttttttgtgataagtagattcaactcacagcgttgaacctttcttttgatagagcagttttgaaaaactcttttatcgaatctgcaagtagacatttggagtgctttgagggctgtggtgcaaaaggaaatgtcttcccatagaaactagactgaagcattctcagcaacttctttgtgacgtttgcattcatctcacagtgttgaacatacctttccatagagtagttttgaaacactatttttgtagaatctgcaagtggatatttggactgctttgaggtcttcatcggaaacgggaatatcttcacataaacactagacagaagcattctcagaaacttctttgtgatctgtccattcaactcacagagttgaaccttcctttttatggagcagttttgaaacactgtttttggagaatctgcaagtggatatttggagcgctttgaggcctatggtagaaaaagaaatatctgcctctaaaaactagacagaagcattctcagaaactgctttgtgatatgtgcattcgactcaccgagttgaaattttttttgatagagcagttttgaaacactctgtagaatctgaaagtggatatttggagctctttgagggctatggcggaaaagaaaatatattcacattaaagtagacagcagcattcccagaaacttccttaggatgtttgcagtaaactcacagagttgagcattcctttccgtagagcagttttgaaacactctgtttgtgggatccgcaagtggacatttggaccgctttgagacctttgctggaaatgggaatatcttcacatataaactggacagaagcattctcagaagcttcttcgtgatgtgtgcattctactcccaaatttgaatcttccttttcatgaagcagttttgaaacactctgtttgtgcaatccacaattggataattggaaagctttgatgcccatggtagaaaaggaaatatcctcatataaaaactagacagaaggattcacagaaaatgctttgtgatgtgtgcattcaaatcacggagttgaatctttcttttgttagagcagatttgaaagactgtttctgtggaatctgccagcggacacttggagcgctttgagggctacggtggagaaggaaatatcttcacataaaaactagaaagaagcattctcagaaccatttatgtgaagcgtcctttcaactcacagagttgaaccttccttttgatagaacagttttgaaacactcttttgaacaattgcaggtgaatatttggagggctttgaagcctttgttggaaatgggaatatcttcacacacaaactagccagaagctttctcagaaacttctttgtgatgtgtgcgttgaacccagagagatcaacctttcctttgatagagcagttttgaaacgtgtttttgtaagatctgcaagcggatagttggcttcgctttgtgtcctttggtggaaacgggaatatcttctaataaaaactagacagaaatattctcacaatctcctttgtgatgtgggcattcaactaacacagttgaacatttcttttcacagagcagttttgaaacactcttttggtagaatctgccagtggatatttggagcgctttgagggctgttgtgccaatggaaatatctgcccctaaaatctagacagaagcattctcagaaactacttcgtgatgtttgcattcaactcacagagttgaacataactcttcatagagcaattttgaaaacctctttttggagaatctgcaagtggatattcagaccactttgaggccttcataggaaacagtaatatcttcacataaaaactatatagaagcattgtcagaaagttctttgtgatgtgtgaattcaactcacagagttgaaccttccttcaattgagcagttgtgaaacactctttttctagaatctgcaagtagatatttggagcgctttgaggccttcgttggaaaccggaatatcttcacaggaaaagtagatagaggcattctcagaaactttttcgtgatatgtggattcaactcacagcgttgaacctttcttttgatagagcagttttgtaaaactcttttatcgaatctgcatgtagacatttggagtgctttgggggctgtggtgcaaaaggaaatgtcttcccatagaaactagactgaagcattctcagcaacttcttggtgacgtttgcattcatctcacagtgttgaacatacctttccatagagtagttttgaaacactgtttttgtagaatcggtaagtggatatttggactgctttgaggccttcatcggaaacgggaatatcttcacataaacactagagagaagcattctcagaaacttctttgtgatctgtccattcaactcagagagttgaaccttcctttttatggagcagttttgaaacactgtttgtggagaatctgcaagtggatatttggagcgccttgaggccaatggtagaaaaagaaatatctgcctctaaatactagactgaagcattctgagaaacttctttgtgatgtttgccttcaactaccagagttgaaccttccttttgatagggcagtttggaaacactctttttgtagaatctgcatgtggatatctggagcgatttgaggcctacggtccaaaaggaaatatcttcctgggaaaaatagacgaaagcattctcagaaactgctttgtgatatgtgcattcgactcacctagttgaaactttttttggatagagcagttttgaaacactctgtagaatctgaaagtggatatttggagctctttgagggctatggcggaaaagaaaatatattcacattaaactagacagcagcattctcagaaacttctttaggatgtttgcagtaaactcacagagttgaacatacctttcggtagagcagttttgaaacactgtttgtgggatccgcaagtggatatttggaccgctttgagacctttgctggaaatgggaatatcttcacatataaactagacggaagcattctcagaaacttcttcgtgatgtgtgcattctactcccagatttgaatcttccttctcatgaagcagttttgaaacactctatttgtgcaagctacaattggataattggaacgctttgatgcccatggtagagaaggaaatatcctcatataaaaactagacagaaggattcacagaaaatgctttgtgatgtgtgcattcaaatcacggagttgaatatttcttttgttagagcagttttgaaacactgtttctgtggaatctgccagcggacacttggagcgctttgagggctatggtggagaaggaaatatcttcacataaaaactagaaagaagcattctcagaaccatttatgtgaagcgtgcgttcaactcacagagttgaaccttccttttgatagaacagttttgaaacactcttttgaacaattgcaggtgaatatttggagggctttgaagcctttgttggaaatgggaatatcgtcacacacaaactagccagaagcattctcggaaacttctttgtgatgtgtgcgttgaacccagagagatgaacctttcctttgatagagcagttttgaaacgtgtttttgtaagatctgcaagcagataattggcttcgctttgtgtcctttggtggaaacgggaatatcttctaataaaaactagacagaaatattctcagaatcttctttgtgatgtgggcattcaactaacacagttgaacgtttcttttcacagagcagttttgaaacactcttttggtagaatctgccagtggatatttggagcgctttgagggctattgtgccaacgaaaatatctgcccctaaaaactagacagaagcattctcagaaactgctttgtgatgtttgcattcaactcacagagttgaacctaccttttcatagagcagttttgaaaacctctttttgtagaatctgcaagaggatattcggaccactttgaggccttcataggaaacagtaatatcttcacataaaaactagatagaagcattgtcagaaagttctttgtgatgtgtgaattcaactcacagagttgaaccttcctttaatagagcagttgtgaaacactctttttctagaatctgcaagtagatatttggagcgctttgaggccttcgttggaaaccggaatatcttcacaggaaaattagatagaggcattctcagaaactttttttgtgatatgtagattcaactcacagtgttgaacctttctttggatggagcagttttgaaaaactcttttatcgaatctgcaggtagacatttggggtgctttgagggctgtggtgcaaaaggaaatgtcttctcatagaaactagactgaagcattctcagcaacttctttgtgacgtttgcattcatctcacagtgttgaacataccttttcatagagtagttttgaaacactatttttgtagaatctgcaagtggatatttggactgctctgaggccttcatcggaaacgggaatatcttcacataaacactagacagaagcattctcagaaacttctttgtcatctgtccattcaactcacagagttgaaccttcctttttatggagcagttttgaaacactccttttggagaatctgcaaatggatatttggagcgctttgaggcctatggtagaaaaagaaatatctgcctctaaaaaccagacagaagcattctgagaaacttctttgtgatgtttgcattcaactaccagagttgaaccttccttttgatagggcagtttggaaacactctttttgtagaatctgcatgtggatatctggagcgatttgaggcctacggtcaaaaaggaaatatcttcctgggaaaaatagatgaaagcattctcagaaactgctttgtgatatgtgcattccactcaccgagttgaaacttttttttgatagagcagttttgaaacactctgtagaatctgaaagtggatatttggagctctttgagggctatggcggaaaagaaaatatattcacattaaagtagacagcagcgttctcagaaacttctttaagatgtttgcagtaaactcacagagttgaacatacctttccgtagagcagttttgaaacactctgtttgtgggatccgcaagtggatatttggaccgctttgagacctttgctggaaatgggaatatctgcacatttaaactagacagaagcattctcagaaacttcttcgtgatgtgtgcattctactcccgaatgtgaatcttccttttcatgaagcagttttgaaacactctgtttctgcaatccacaattggataattggaacgctttgatgcccatggtagaaaaggaaatatcttcatataaaaactagacagaaggattcacagaaaatgctttgtgatgtgtgcattcaaatcacggagttgaatctttcttttgtgagagcagttttgaaacactgtttctgtggaatctgccagcggacacttggagcgcttttagggctatggtggagaaggaaatatcttcccataaaaactagaaagaagcattctcagaaccatttatgtgaagcgtgcattcaactcacagagttgaaccttccttttgatagaacagttttgaaacactcttttgaacaattgcaggtgaatctttggagggctttgaagcctttgttggaaatgggaatatcttcacacacaaactagccagaagcattctcagaaacttctttgtgatgtgtgcgttgaacccagagagatgaaccattcctttgatagagcagttttgaaacgtgtttttgtaagatctgcaagcggatagttggcttcggctttgtgtcctttggtggaaacgggaatatcttctaataaaaactagacagaaaatattctcagaatctcctttgtgatgtgggcattcaacttacacagttgaacatttcttttcacagagcagttttgaaacactcttttggtagaatctgccagtggatatttggagcgcttggagggctattgtgccaatggaaatatctgcccctgaaaactagacagaagcattctcagaaactacttcgtgatgtttgcattcaacacacagagttgaacatacctcttcacagagcagttttgaaaacctctttctgtagaatctgcaagtggatattcagaccactttgaggccttcataggaaacagtaatatcttcacataaaaactagatagaagcattgtcagaaagttctttgtgatgtgtgaattcaactcacagagttgaaccttcctttaatagagcagttttgaaacactctttttctagaatctgcaagtagatatttggagcgcttggaggccttcgttggaaaccggaatatcttcacaggaaaagtagatagaggcattctcagaatctttttcgtgttatgtggattcaactcacagcgttgaacctttcttttgatagagcagttttgtaaaactcttttatcgaatctgcaagtagacatttggagtgctttcagggctgtggtgcaaaaggaaatgtcttcccatagaaactagactgaagcattctcagcaacttcttggtgacgtttgcattcatctcacagtgttgaacatacctttccatagagtggttttgaaacactgtttttgtagaatcggcaagtggatatttggactgctttgaggccttcatcggaaacgggaatatcttcacataaacatagagagaagcattctcaggaaacttctttgtgatctgtccattcaactcacagagttgaaccttcctttttatggagcagttttgaaacactgtttgtggagaatctgcaagtggatatttggagcgccttgaggccaatggtagaaaaagaaatatctgcctctaaatactagactgaagcattccgagaaacttctttgtgatgtttgcattcaactagcagagttgaaccttccttttgatagggcagtttgggaacactctttttgtaaaatctgcatgtggatatctggagcggtttgaggcctacggtcaaaaaggaaatatcttcctgagaaaaatagacgaaagcattctcagaaactgctttgtgatatgtgcattcgactcaccgagttgaaacttttttttgatagagcagttttgaaacactctgtagaatctgaaagtggatatttggagctcgttgagggctatggcggaaaagaaaagatattcacattaaactagacagcagcattctcagaaacttctttaggatgtttgcagtaaactcacagagttgaacatacctttccgtagagcagttttgaaacactctgtttgtgggatccgcaagtggatatttggaccgctttgagacctttgctgcaaatggggatatcttcacgtataaactagacagaagcattctcagaaacttcttcgtgatgtgtgcagtctactcccgaatttgaatcttccttttcatgaagcagttttgaaacactctgtttgtgcaatccacaattggataattggaacgctttgatgcccatggtagaaaaggaaatatcctcatataaaaactagacagaaggattcacagaaaatgctttgtgatgtgtgcattcaaatcacggagttgaatctttcttttgtcagaccagttttgaaacactgtttctgtggaatctgccagcggacacttggagcgctttgagggctatggtggagaaggaaatatcttcccctaaaaactagaaagaagcattctcggaaacatttatgtgaagcgtgcattcaactcacagagttgaaccttccttttgatagaacagttttgaaacactcttttgaacaattgcaggggaatctttggagcgctttgaagcctttgttggaaatgggaatatcttcacacacaaactagccagaagcattctcagaaacttctttgtgatgtgtgcgttgaacccagagagatgaacctttcctttgatagagcagttttgaaacgtgtttttgtaagatctgtaagcggatagttggcttcgctttgtgtcctttggtggaaacgggaatatcttctaataaaaactagacagaaatattctcacaatctcctttgtgatgtgggcattcaactaacacagttgaacatgtcttttcacagagcagttttgaaacactcttttggtagtatctgccagtggatatttggagcgctttgagggctgttgtgccaatggaaatatctgcccttaaaatctagacagaagcattctcagaaactacttcgtgatgtctgcattcaacacacagagttgaacatacctcttcacagagcagttttgaaaacctctttctgtagaatctgcaagtggatattcggaccactttgagcccttcataggaaacagtaatatcttcacataaaaactagatagaagcatagtcagaaagttctttgtgatgtgtgaattcaaatcacagagttgaaccttcctttaatagagcagttttgaaacactctttttctagaatctgcaagtagatatttggagcgctttgaggccttcgttggaaaccggaatatcttcacataaaaagcagatagtggcatgctcagaaacttttttgtcatatgtagattcaactcacaacgttgaacctttcttttgatagagcagttttgaaaaactcttttatcgaatctgcaagtagacatttggagtgctttgagggctgtggtgcaaaaggaaatgtcttcccatagaaactagactgaagcattctcagcaacttcttggtgacgtttgcatgcatctcacagtgttgaacatacctttgcatagagcggttttgaaacactatttttgtagaatctgcaagtggatatttggactgctttgaggccttcatcggaaacgggaatatcttcacataaacactagacagaagcattctcagaaacttctttgtggtctgtccattcatctcacagagttgaaccttcttttttatggagcagttttgaaacactgttttcggagaatctgcaagtggatatttggagcgctttgaggcctatggtagaaaaagaaatatctgcctatgacaactagacagaagcattccgagaaacttctttgtgatgtttgcattcaactagcagaggtgaaccttccttttgatagggcagtttggaaacactctttttgtagaatctgcatgtggatatctggagcggtttgaggcctacggtcaaaaaggaaatatcttcctgggaaaaatagacgaaagcattctcagaaactgctttgtgatatgtgcattccactcaccgagttgaaacttttttttgatagagcagttttgaaacactctgtagaatctgaaagtggatatttggagctctttgagggctatggcggaaaagaaaatatattcacattagactagagaggagcattctcagaaacttctttaggatgtttgcagtaaactcacagagttgaacataaatttccgtagagcagttttgaaacactctgtttgtgggatccgcaaggggatatttggaccgctttgagacctttgctggaaatgggaatatcttcacatataaactagacagaagcattctcagaaacttcttcgtgatgtgtgcattctactcccaaatttgaatcttccttttcatgaagcagttttgaaacactctatttgtagaatctacaattggatatttggaactctttgatgcccatggtagaaaaggaaatatcctcatataaaaactagacagaaggattcacagaaaatgctttgtgatgtgtgcattcatatcacggagttgaacctttctcttgctagagcagttttgaaacactgtctctgtggaatctgcctgcggacacttggagcgctttgagggctatggtagagaaggaaatatcttcagataaaaactagaaagaagaattctcagaaccatttatgtgaagcgtgcattcaactcacagagttgaaccttccttttgatagaacagttttgaaacactcttttgaacaattgcaggtgaatatttggagggctttgaagcctttgttggaaacgggaatatcttcacacacgaactagccagaagcattctcacaaacttctttgtgatgtgtgcgttgaacccagagagatgaacctttcctttgatagagcagttttgaaacgtgtttttgtaagatctgcaagcggataattggcttcgctttgtgtcctttggtggaaacgggaatatcttctaataaaaactagacagaaatattctcagaatctcctttgtgatgtgggcattcaactaacacagttgaacatttcttttcacagagcagttttgaaacactcttttggtagaatctgccagtggatatttggagcgcttggagggctattgtgccaatggaaatatctgcccctgaaatctggacagaagcattctcagaaactacgttgtgatgtttgcattcaactcacagtgttgaacatacctcttcatagagcagttttgaaaacctcttttggtagaatctgcaagtggatatttggaccactttgaggtcttcataggaaacagtaatatcttcacataaaaactagatggaagcattgtcagaaagttctttgtgatgtgtgaattcaactcacagagttgaaccttcctttaatagagcagttgtgaaacactctttttctagaatctgcaggtagatatgtggagcgctttgaggccttcgttggaaaccggaatatcttcacaggaaaagtagatagaggcattctcagaaacttttttgtgatatgtagattcaactcacagcgttgaacctttctttggatggagcagttttgaaaatcccttttatcgaatctgcaggtagacatttggggtgctttgagggctgtggtgcaaaaggaaatgtcttcccatagaaactagactgcagccttctcagcaacttctttgtgacgtttgcattcatctcacagtgttgaacatacctttccatagagtagttttgaagcactatttttgtagaatctgcaagtggatatttggactgctttgaggccttcatcggaaacgggaatatcttcacataaacactagacagaagcattctcagaaacttctttgtcatctgtccattcaactcacagagttgaaacttcctttttatggagcagttttgaaacactccttttggagaatctgcaggtggatatttggagcgctttgaggcctatggtagaaaaagaaatatctgcctctaaaaaccagacagaagcattccgagaaacttctttgtgatgtttgcattcaactagcagagttgaaccttccttttgatagggcagtttggatacactctttttgtagaatctgcatgtggatatctggagcggtttgaggcctacggtcaaaaaggaaatatcttcctgggaaaaatagacgaaaacattctcagaaagtgctttgtgatatgtgcattcgactcaccgagttgaaacttttttttgatagagcagttttgaaacactctgtagaatctgaaagtggatatttggagctctttgagggctatggcggaaaagaaaatatattcacattaaagtagacagcagcattctcagaaacttctttaggatgtttgcagtaaactcacagagttgaacttacctttccgtagagcagttttgaaacactctgtttgtgggatccgcaagtggatatttggaccgctttgagacctttgctggaaatgggaatatcttcacatataaactagacagaagcattctcagaaacttcttggtgatgtgtgcattgtactcccaaatttgaatcttccttctcatggagcagttttgaaacactctgtttgtgcaatctacaattggagaattggaacgcttggatgcccgtggtagaaaaagaaatatcctcatataaaaactagacagaaggattcacagaaaatcctttgtgatgtgtgcattcaaatcacggagttgaatctttcttttgtcagagcagttttgaaacactgtttctgtggaatctgccagcggacacttggagcgctttgagggctgtggtggagaaggaaatatcttcccataaaaactagaaagaagcattctcagagccatttatgtgaagcgtgcattcaactcacagagttgaaccttccttttgatagaacagtttttaaacactcttttgaacaattgcacgtgaatatttggagggctttgaagcctttgttggaaatgggaatatcttcacacacaaactagccagaagcattctcagaaacttctttgtgatgtgtgcgttgaacccagagagatgaacctttcctttgaaagagcagttttgaaacgtgtttttgtaagatctgcaagcggatagttggcttcgctttgtgtcctttggtggaaacgggaatatcttctaataaaatctagacagaaatattctcagaatcttctttgtgatgtgggcattcaactaacacagttgaacgtttctttgcacagagcagttttgaaacactcttttggtagaatctgccagtggatatttggagcgctttgagggctattgtgccaacggaaatatctgcccctaaaaactagacagaagcattctcagaaactgctttgtgatgtttgcattcaactcacagacttgaacatacctctgcatagagcacttttggaaacctctttttgtagaatctgcaagtggatattcggaacactctgaggccttcataggaaacagtaatatcttcacataaaaaatagataaaagcattgtcagaaagttctttgtgatgtgtgaattcaactcacagagttgaaccttcctttcatagagcagttttgaaacactctttttctagaatctgcaagtagatatttagagcgctttgaggccttcgttggaaaccggactatcttcacgtaaaaagtagatagaggcattctcagaaaacttttttgtgatatgtagattccactcacagcgttgaacctttcttttgatagagcagttttgaaaaattcttttatcgaatctgcaagtagacatttggggtgctttgagggctgtggtgcaaaaggaaatgtcttcccatggaaactagactgaagcattctcagcaacttcttcgtgaggtttgcactcatctcacagtgttgaacagacctttccatagagtagttttgaaacactatttttgtagaatctgcaactggatatttggactgctttgaggccttcatcggaaacgggaatatcttcacataaacactagagagaagcattctcagaaacttctttgtcatctgtccattcaactcacagagttgaacctacctttttatggagcagttttgaaacactccttttggagaatctgcaagtggatatttggagcgctttgaggcctatggtagaaaaagaaatatctgcctctaaaaaccagacagaagcattctgagaaaagttctttgtgatgtttgcattcaactaggcagagttgaaccttccttttgatagggcagtttggaaacactctttttgtagaatcttcatgtggatatctggagcggtttgaggcctacggtcaaaaaggaaatatcttcctgggaaaaatagacgaaagcattctcagaaagggctttgtgatatgcgcattcgactcaccgagttgaaacttttttttgatacagcagttttgtaacactctgtagaatctgaaagtggatatttggagctctttgagggctatggcggaaaagaaaatatattcacattaaagtagacagcagcattctcagaaacttctttatgatgtttgcatcaaactcacagagttgaacatacctttccatagagcagttttgaaacactctttttgtggaatccgcaagtggatatttggaccgctttgagaccttcgctggaaatgggaatatcttcacatataaactggactgaagcattctcagaaacttcttcgtgatgtgtgcattctactcccaaatatgaatcttccttttcatgaagcagttttgaaacactctatttgtgcattctacaattggatgattggaacgctttgatgtccatggtagaaaaggaaatatcctcatataaaaactagacagaaggattcacagaaaatgttttgtgatgtgggcattcaaatcacggagttgaatctttcttttgttagagcagttttgaaacactgtttctgtggaatctgccagcagacacttggagcgctttgagggctgtggtggagaaggaaatatcttcccataaaaactagaaagaagcattctcagaaacatttatgtgaagcgtgcattcaactcacagagttgaaccttccttttgatagaacagttttgaaacactcttttgaacaattgcaggtgaatctttggagcgctttgaagcctttgttggaaatgggaatatcttcacacacaaactagccagaagcattctcagaaacttctttgtgatgtgtgtgttgaacccagagagatgaacctttcctttgatagagcagttttgaaacgtgtttttgtaagatctgcaagcggataattggcttcgctttgtgtcctttggtggaaacgggaatatcttctaataaaaactagacagaaatattctcagaatcttctttgtgatgtgggcattcagctaacacagttgaacgtttcttttcacagagcagttttgaaacactcttttggtagaatctgccagtggatatttggagcgctttgagggctaatgtgccaatggaaatatctgcccctaaaaactagacagaagcattctcagaaactacattgtgatgtttgcattcgactcacagagttgaacatacctcttcatagagcagtttttaaaaccttttttgtagaacctgaaagttgatattcggaccactttgaagccttcataggaaacagtaatatcttcacataaaacctagatagaagcattgtcagaaagttctttgtgatgtgtgaattcaactcacagagttgaaccttcctttaatagagcagttttgaaacactctttttctagaatctgccagtagataattggagcgctttgaggccttcgttggaaaccggaatatcttcacataaaaagtagatagaggcattctcagaaactttttcgtgatatgtggattcaactcacagcgttgaaactttcttttgatagagcagttttgtaaaactcttttatcgaatctgcaagtagacatttggagtgctttgagggctgtggtgcaaaaggaaatgtcttcccatagaaactagactgaagcattctcagcaacttctttgtgacgtttgcattcaaatcacagtgttgaacatacctttgcatagagtagttttgaaacactatttttgtagaatctgcaagtggatatttggactgctttgaggccttcatcggaaacgggaatatcttcacataaacactggacagaagcattctcagaaacttctttgtggtctgtccattcaactcacagagttgaaccttcctttttatggagcagttttgaaacactgtttttggagaatctgcaagtggatatttggagcgctttgaggcctatggtagaaaaagaaatatctgcctatgacaactagacagaagcattccgagaaacttctttgtgatgtttgcattcaactagcagagttgaaccttccttttggtagggcagtttggaaacactctttttgtagaatctgcatgtggatatctggagcggtttgaggcctacggtcaaaaaggaaatatcttcctgggaaaaatagacgaaagcattctcagaaagtgctttgtgatatgtgcattcgactcaccgagttgaaacttttttttgatagagcagttttgaaacactctgtagaatctgaaagtggatatttggagctctttgagggctatggcggaaaagaaaatatattcacattaaaaaagtagacagcagcattctcagaaacttctttaggatgtttgcagtaaactcacagagttgaacatacctttccgtagagcagttttgaaacactctgtttgtgggatccgcaagtggatatttggacccctttgagacctttgctggaaacgggaatatcttcacatataaactagacagaagcattctcagaaacttcttcgtgatgtgtgcattgtactcccaaatttgaatcttccttctcatggagcagttttgaaacactctgtttgtgcaatctacaattggagaattggaaggcttggatgcccgtggtagaaaaggaaatatcctcatataaaaactagacagaaggattcacagaaaatgctttgtgatgtgtgcattcaaatcgcggagttgaatctttcttttgttagagcagttttgaaacactgtttctgtggaatctgccagcggacacttggagcgctttgagggctatggtggagaaggaaatatgttcacataaaaactagaaagaagcattctcagaaacatttatgtgaagcgtgcattcaactcacagagttgaaccttcctttcgatacaacagttttgaaacactcttttgaacaattgcaggtgaatctttggagcgctttgaagcctttgttggaaatgggaatatcttcacacacaaactagccagaagcattctcagaaacttctttgtgatgtgtgcgttgaacccagagagatgaacctttccttggatagagcagttttgaaacgtgtttttgtaagatctgcaagcggataattggcttcgctttgtgtcctttggtggaaacgggaatatcttctgataaaaactagacagaaatattctcagaatctccctttgtgatgtgggcattcaactaacacagttgaacatttcttttcacagagcagttttgaaacactcttttggtagaatctgccagtggatatttggagcgcttggagggctattgtgccaatggaaatatctgcccctgaaaactagacagaagcattctcagaaactgcttcgggatgtttgcattcaactcacagagttgaacatacctctgcatagagcagttttgaaaacctctttttgtagaatctgcaagtggatattcggaccactttgaggccttcataggaaacagtaatatcttcacataaaaactagatagaagcattgtcagaaagttctttgtgatgtgtgaattcaactcacagagttgaaccttcctttaatagagcagttttgaaacactctttttctagaatctgccagtagatatttggagcgctttgaggccttcgttggaaacaggaatatcttcacataaaaagtagatagaggcattctcagaaacttttttgtgatatgtagattcaactcacagcgttgaacctttctttggatggagcagttttgaaaaactcttttatcgaatctgcagttagacatttggggtgctttgagggctgtggtgcaaaaggaaatgtcttcccatagaaactagactgaagcattctcagcaacttcttggtgacgtttgcattcatctcacagtgttgaacatacctttccatagagtggttttgaatcactgtttttgtagaatcggcaagtggatatttggactgctttgaggccttcatcggaaacgggaatatcttcacataaacactagagagaagcattctcagaaacttctttgtcatctgtccattcaactcacagagttgaaccttcctttttctggagcagttttgaaacactctttttggagaatctgcaagtggatatttggagcgctttgaggcctatggtagaaaaagaaatatctgcccctaaacaccagacagaagcattccgagaaacttctctgtgatgtttgccttcaactagcagagttgaaccttccttttgatagggcagtttggaaacactctttttgtagaatctgcatgtggatatatggagcggtttgaggcctacggtcaaaaaggaaatatcttcctgggataaatagacgaaagcattctcagaaactgctttgtgatatgtgcattcgactcaccgagttgaaaattttttttgatagagcagttttgaaacactctgtagaatctgaaagtggatatttggagctctttgagggctacggcggcaaagaaactatattcacattaaagtagacagcagcattctcagaaacttctttaggatgtttgcagtaaactcacagagttgaacatacctttccgtagagcagttttgaaacactctgtttgtgggatccgcaagtggatatttggaccgctttgacacctttgctggaaatgggaatatcttcacatataaactagacagaagcattctcagaaacttcttcgtgatgtgtgcattctactcccaaatttgaatcttccttttcatgaagcagttttgaaacactctgtttgtgcattctacaattggatgattggaacgctttgatgtccatggtagaaaaggaaatatcctcatataaaaactagacagaaggattcacagaaaatgctttgtgatgtgtgcattcaaatcacggagttgaatctttcttttgtcagagcagttttgaaacactgtttctgtggaatctaccagcggacacttggagcgctttgagggctatggtggagaaggaaatatcttcacataaaaactagaaagaagcattctcggaaacatttatgtgaagcgtgccttcaactcacagagttgaaccttccttttgatagaacagttttgaaacactcttttgaacaattgcaggtgaatctttggagcgctttgaagcctttgttggaaatgggaatatcttcacacacaaactagccagaagaattctcagaaacttctttgtgatgtgtgcgttgaacccagagagatgaacctttcctttgatagagcagttttgaaacgtgtttttgtaagatcggcaagcggataattggcttcgctttgtgtcctttggtggaaacgggaatatcttctaataaaaactagacagaaatattctcagaatctcctttgtgatgtgggcattcaactaacacagttgaacatttcttttcacagagcagttttgaaacactcttttggtagaatctgcatgtggatatttggagcgcttggaggactattgtgccaatggaaatatctgcccctgaaaactagacagaagcattctcagaaactgcttcgtgatgtttgcattcaactcacagacttgaacatacctctgcatagagcagttttgaaaacctctttttgtagaatctgcaagtggatattcggaccactctgaggccttcataggaaacagtaatatcttcacataaaaactagatagaagcattgtcagaaagttctttgtgatgtgtgaattcaactcacagagttgaaccttcctttaatagagcagttttgaaacactctttttctagaatctgctagtagatatttggagtgcttggaggccttctttggaaaccggaatatcttcacaggaaatgtagatagaggcattctcagaaacttttttgtgatatgtagtttcaactcacagcgttgaacctttcttttgatagagcagttttgaaaaactcttttatcgaatctgccagtagacctttggagtgctttgagggctgtggtgcaaaaggaaatgtcttcccatagaaactagactgaagcattctcagcaacttcttggtgacgtttgcattcatctcacagtgttgaacatacctttccatagagtagttttgaaacactgtttttgtagaatcggtaagtgaatatttggactgctttgaggccttcatcggaaacgggaatatcttcacataaacactagagagaagcattgtcggaaacttctttgtgatctgtccgttcaactcacagagttgaaccttcctttttatggagcagttttgaaacactgtttgtggagaatctgcaagtggatatttggagcgccttgaggccaatggtagaaaaagaaatatctgcctctaaatactagactgaagcattctgagaaacttctttgtgatggttgcatgcaactacaagagttgaaccttccttttgatagggcagtttggaaacactctttttgtagaatctgcatgtggatatctggagcgatttgaggcctatggtcaaaaaggaaatattttcctgggaaaaatagacgaaagcattctcagaaagtgctttgtgatatgtgcattcgactcaccgagttgaaacttttttttgatagagaagttttgaaacactctgtagaatctgaaagtggatatttggagctctttgagggctatggcggaaaagaaaatatattcacattaaaaaagtagacagcagcattctcagaaacttctttaggatgtctgcagtaaactcacagagttgaacatacctttccgtagagcagttttgaaacactctgtttgtgggatccacaagtggatatttggacagctttgagatctttgctggaaatgggaatatcttcacatataaactagacagaaggattcacagaaaatgctttgtgatgtgtgcattcaaatcacggagttgaatctttcttttattagagcagttttgaaacactctatttgtgcaatctacaattggataattggaaccctttgatgcccatggtagaaaatgaaatatcctcatataaaaactagacggaaggattcacagaaaatgctttgtgatgtgtgcattcagatcacggagttgaatctttcttttgttagagctgttttgaaacactgtttctgtggaatctgccagcggacacttggagcgctttgagggctatggtggagaaggaaatatcttcacataaaaactagaaagaagcattctcagaaacatttatgtgaagcgtgcattcaactcacagagttgaaccttccttttgatacaacagttttgaaacactcttttgaacaattgcaggtgtatctttggagcgctttgaagcctttgttggaaatgggaatatcttcacacacaaactagccagaagcattctcagaaacttctttgtgatgtgtgcgttgaacccagagagatgaacctttcctttgatagagcagttttgaaacgtgtttttgtaagatcggcaagcggataattggcttcgctttgtgtcctttggtggaaactggcatgtcttctaataaaaactagacagaaatattctcagaatctcctttgtgatgtgggcattcaactaacacagttgaacattacttttcacagagcagttttgaaacactcttttggtagaatctgccagtggatatttggagcgcttggagggctattgtgccaatggaaatatctgcccctgaaaactagacagaagcattctcagaaactgcttcgtgatgtctgcattcaacacacagagttgaacatacctcttcacagagcagttttgaaaacctctttctgtagaatctgcaagtggatattcggaccactttgaggccttcataggaaacagtaatatcttcacataaaaactagatagaagcattgtcagaaagttctttgtgatgtgggaattcaacacacagagttgaaccttcctttaatagagcagtttgaaacactctttttctagaatctgccagtagatatttggagcgctttgaggccttcgttggaaaccggaatatcttcacataaaacgtagatagaggcattctcagaaacttttttgtgatatgtagattcaactcacagcgttgaacctttctttggatggagcagttttgaaaaacacttttatcgaatctgcaggtagacatttggggtgctttgagggctgtggtgcaaaaggaaatgtcttcccatagaaactagactgaagcattctcagcaacttctttgtgacgtttgcattcatctcacagtgttaaacatacctttccatagagtagttttgaagcactatttttgtagaatctgcaagtggatatttggaatgctttgaggccttcatcggaaacgggaatatcttcacataaacactagacagaagcattctcagaaacttctttgtgatctgtccattcaactcacagagttgaaccttcctttttatggagcagttttgaatcactgtttttgtagaatctgcaagtggatatttcgagcgctttgaggcctatggtagaaaaagaaatatctgcctctaaaaaccagacagaagcattctgagaaacttctttgtgatgtttgcattcaactaccagagttgaaccttccttttgatagggcagtttggaaacagtctttttgtagaatctgcatgtggatatctggagcgatttgaggcctacggtccaaaaggaaatatcttcctgggaaaaatagacgaaagcattctcagtaaactgctttgtgatatgtgcattcgactcaccgagttgaaacttttttttgatagagcagttttgaaacactctgtagaatctgaaagtggatatttggagctctttgagggctatggcggcaaagaaactatattcacattaaagtagacagcagcattctcagaaacttctttaggatgtttgcagtaatctcacagagttgaacctacctttccgtagagcagttttgaaacactctgtttgtgggatccgcaagtggatatttggaccgctatgagacctttgctggaaatgggaatatcttcacatataaactagacagaagcattctcagaaacttcttggtgatgtgtgcattgcactcccaattttgaatcttccttctcatggagcagttttgaaacactctgtttgtgcaatctacaattggataattggaacgcttggatgcccatggtagaaaaggaaatatcctcatataaaaactagacagaaggattcacagaaaatgctttgtgatgtgtgcattcaaatcacggagttgaatctttcttttgttagagcagttttgaaacactgtttctgtggaatctgccagcggacactaggagcgctttgagggctacggtggagaaggaaatatcttcacacaaaaactaaaaagaagcattctcagaaacatttatgtgaagcgtgcattcaactcacagagttgaaccttccttttgatacaacagttttgaaacactcttttgaacaattgcaggtgaatctttggagcgctttgaagcctttgttggaaatgggaatatcttcacacaaactagccagatgcattctcagaaacttctttgtgatgtgtgcgttgaacccagagagatgaacctttcctttgatagagcagttttgaaacgtgtttttgtaagatcggcaagcggataattggcttcgctttgtgtcctttggtggaaacgggaatatcttctaataaaatctagacagagatattctcagaaacttctttgtgatgtgggcattcaactgacacagttgaacatttcttttcacagagcagttttgaaacactcttttggtcgaatctgccagtggatatttggagcgctttgagggctattgtgccaatggaaatatctgcccctaaaaactagacagaagcattctcagaaactgctttgtgatgtttgcattcaactcacagaggtgaacatacctcttcatagagcagttttgaaaacctctttttgtagaatctataagtggatattcggaccactttgaggtcttcataggaaacagtaatatcttcacataaaaactagagagaagtattgtcagaaagttctttgtgatgtgtgaattcaactcacagagttgaaccttcctttaatagagcagttttgaaacactctttttctagaatctgcaagtagatatttggagcgctttgaggccttcgttggaaactggaatatcttcacataaaaagtagatagaggcattctcagaaacttttttgtgatatgtagattcaactcacagcattgaacctttctttggatggagcagttttgaaaaactcttttatcgaatctgcaggtagacatttggggtgctttgagggctgtggtgcaaaaggaaatgtcttcccatagaaactagactgaagcattctcagcaacttcttggtgacgtttgcattcatctcacagtgttgaacatacctttccatagagtggttttgaaacactgtttttgtagaatcgacaagtggatatttggactgctttgaggccttcatcggaaacgggaatatgttcacataaacactagagagaagcattctcagaaacttctttgtgatctgtccattcaactcacagagttgaaccttcctttttatggagcagttttgaaacactgtttgtgaagaatctgcaagtggatatttggagcgccttgaggccaatggtagaaaaagaaatatctgcctctaaatactagactgaagcattctgagaaacttctttgtgatgtttgcattcaactaccagagttgaaccttccttttgatagggcagtttggaaacactcattttgtagcatctgcatgtggatatctggagcgatttgaggcctacggtcaaaaaggaaatatcttcctgggaaaaatagacgaaagcattctcagaaactgctttgtgatatgtgcattcgaatcaccgagttcaaacttttttttcatagagcagttttgaaacactctgtagaatctgaaagtggctatttggaactctttgagggctatggcggaaaagaaaatatattcacattaaattagacagcagcattctcagaaacttctttaggatgtctgcagtaaactcacagagttgaacatacctttccgtagagcagttttgaaacactctgtgggatccacaagtggatatttggacagctttgagatctttgctggaaatgggaatatcttcacatataaactagacagaagcattctcagaaacttcttcgtgatgtgtgcattgtactcccaaatttgaatcttccttctcatggagcagttttgaaacactctgtttgtgcaatctacacttggataattggaacgcttggatgcccatggtagaaaaggaaatatcgtcatataaaaactagacagaaggattcacagaaaatgctttgtgatgtgtgcattcaaatcacggagttgaatctttcttttgtcagagcagttttgaaacactgtttctgtggaatctgccagcggacactttgagcgctttgagggctatggtagagaaggaaatatcttcccataaaaactagaaagaagcattctcagaaccatttatgtgaagcgtgcgttctactcacagagttgaaccttccttttgatagaacagttttgaaacactcttttgaacaattgcaggtgaatatttggagggctttgaagcctttgttggaaatgggaatatcttcacacacaaactagccagaagcattctcagaaaattctttgtgatgcgtgcgttgaacccagagagatgaacctttcctttgatagagcagttttgaaacgtgtttttgtaagatctgcaagcggataattggcttcgctttgtgtcctttggtgggaacgggaatatcttctaataaaaactagacagaaatattctcagaatctcctttgtgatgtgggcattcaactaacacagttgaacatttcttatcacagagcagttttgaaacactcttttggtagaatctgccagtggatatttggagcgcttggagggctattgtgccaatggaaatatctgcccctgaaaactagacagaagcattctcagaaactgcttcgggatgtttgcattcaactcacagagttgaacatacctctgcatagagcagttttgaaaacctctttttgtagaatctgcaagtggatattcggaccactttgaggccttcatgggaaacagtaatatcttcacataaaaactacatagaagcattgtccggaagttctttgtgatgtgtgaattcaactcacagagttgaaacttcctttaatagagcagtgttgaaacactctttttctagaatctgcaagtagatatttggagcgcttggaggccttcgttgtaaaccggaatatcttcacaggaaatgtagatagaggcatgctcagaaacttttatgtcatatgtagattcaactcacagcgttgaacctttcttttgatagagcagttttgaaaaactcttttatcgaatctgcaagtagacatttggagtgctttgagggctctggtgcaaaaggaaatgtcttcccatagaaactagactgaagcattctcagcaacttcttggtgacgtttgcattcacctcacagtgttgaacatacctttccatagagtggttttgaaacacagtttttgtagaatcggcaagtggatatttggactgctttgaggccttcatcggaaacgggaatatcttcacataaacactagagagaagcattctcagaaacttccttgtggtctgtccattcaactcacagagttgaaccttcctttttatggagcagttttgaaacactgttttcggaggatctgcaagtggatatttggagcgctttgaggcctatggtagtaaaagaaatatctgcctatgacaactagacagaagcattccgagaaacttctctgtgatgtttgcattcaactagcagagttgaaccttccttttgatagggcagtttggagacactctttttgtagaatctgcatgtggatatctggagcggtttgaggcctacggtcaaaaaggaaatatcttcctgggaaaaatagacgaaagcattctcagaaactgctttgtgatatgtgcattcgactcaccgagttgaaacttttttttgatagagcagttttgaaacactctgtagaatctgaaagtggatatttggagctctttgagggctatggcggcaaagaaactatattcacattaaagtagacagcagcattctcagaaacttctttaggatgtttgcagtaaactcacagagttgaacctacctttccgtagagcagttttgaaacactctgtttgtgggatccacaagtggatatttggaccgctttgagacctttgctggaaatgggaatatcttcacatataaactagacagaagcattctcagaaacttcttcgtgatgtgtgcattctactcccaaatttgaatcttccttttcatgaagcagttttgaaacactctatttgtgcaatctacaatgggataattggaacgctttgatgcccatggtagaaaaggaaatatcctcatataaaaactagacagaaggattcacagaaaatgctttgtgatgtgtgcattcaaatcacggagttgaatctttcttttgttagatcagttttgaaacactgtttctgtggaatctgccagcggacacttggagcgctttgagggctatggtggagaaggaaatatcttcacataaaaactagaaagaagcattctcagaaccgtttatgtgaagcgtgcattcaactcacagagttgaaccttccttttgatagaacagttttgaaacactcttttgaacaattgcaggtgaatatttggagggctttgaagcctttgttggaaatgggaatatcttcacacacaaactagccagaagcattctcagaaacttctttgtgatgtgtgcgttgaacccagagagatgaacctttcctttgatagagcagttttgaaacgtgtttttgtaagatctgcaagcggatagttggcttagctttgtgtcctttggtggaaacgggaatattttctaataaaaactagacagaaatattctcagaatcttctttgtgatgtgggcattcaactaacacagttgaacctttcttttcacagagcagttttgaaacactcttttgctagaatctgccagtggatatttagagcgctttgagggctattgtgccaacggaaatatctgcccctaaaaactagacagaagcattctcagaaactactttgtgatgtttgcattcaactcacagagttgaacatacctcttcatagagcagttttgaaaacctctttttgtagaatctgcaagtggatattcggaccactttgaggccttcataggaaacagtaataccttcacataaaaactagatagaagcattgtcagaaagttctttgtgatgtgtgaattcaactcacagagttgaaccttccattaatagagcagttttgaaacactctttttctagaatctgcaagtagatatttggagcgctttgaggccttcgttggaaaccggaatatcttcacataaaaagtagatagaggcattctcagtaaacttttttgtgatatgtagattcaactcacagcgttgaacctttctttggatggagcagttttgaaaaacccttttatcgaatctgcaggtagacatttggggtgctttgagggctgtggtgcaaaaggaaatgtcttcccatagaaactagactgaagcattctcagcaacttctttgtgacgtttgcattcatctcacagtgttgaacatacctttccatagagtagttttgaaacactgtttttgtagaatcggcaagtggatatttggactgctttgaggccttcatcggaaacgggaatatcttcacataaacactagagagaagcattctcagaaacttctttgtgatctgtccattcaactcacagagttgaaccttcctttttatggagcagctttgaaacactctttttggagaatctgcaagtggatattcggagcgctttgaggcctatggtagaaaaagaaacatctgcctctaaaaactagactgaagcattctgagaaacttctttgtgatgtttgctttcaactaccagagttgaaccttccttttgatagggcagtttggaaacactctttttgtagaatctgcatgtggatatctggagcgatttgaggcctacagtcaaaaaggaaatatcttcctgggaaaaatagacgaaagcattctcagaaactgctttgtgatatgtgcattcgactctccgagttgaaacttttttttgatagagcagttttgaaacactctgtagaatctgaaagtggatatttggagctcttcgagggctatggcggaaaagaaaatatattcacattaaactagacagcagcattctcagaaacttctttaggatgtttgcagtaaactcacagagttgaacctacctttccgtagagcagttttcaaacactctgtttgtgggatccgcaagtggatatttggaccgctttgagacctttgctggaaatgggaatatcttcacatataaactagacagaagcattctcagaatcttcttcgtgatgtgtgcattctactcccgaatttgaatcttccttttcatgaagcagttttgaaacactctgtttgtgcaatccacaattggataaatggaacgctttgatgcccatggtagaaaaggaaatatcctcatataaaaactagacagaagcattcacagaaaatgctttttgatgtgtgcattcaaatcacggagttgaatctttcttttgttagagcagttttgaaacactgtttctgtggaatctgccagcggacacttggagcgctttgagggctatggtggagaaggaaatatcttcacataaaaactagaaagatgcattctcagaaacatttatgtgaagcgtgcattcaactcacagagttgaaccttccttttgatagaacagttttgaaacactcttttgaacaattgcaggtcaatatttggagcgctttgaagcctttgctggaaatgggaatatcttcacgcacaaagtagccagaagcattctcagaaacttctttgtgatgtgtgcgttgaacccagagagatgaacctttcctttgatagagcagttttgaaacgtgtttttgtaagatcggcaagcggataattggcttcgctttgtgtcctttggtggaaacgggaatatcttctaacaaaaactagacagaaatattctcagaatcttctttgtgatgtgggcattcaactaacacagttgaacgtttcttttcacagagcagttttgaaacactcttttggtagaatctgccagtggatatttggagcgctatgagggctattgtgccaacggaaatatctgcccctaaaaactagacagaagcatcctcagaaactactttttgatgtttgcattcaactcacagagttgaacataccccttcatagagctgtttttaaaacctctttttgtagaatctgcaagtggatatttggaccactttgtgacctttcctggaaatggaaatatcttcacctaaaaactagacagaagcattgtcaggaagttctttgtgatgtgtgaattcaactcacagagttgaaccttcctttaatagagcagttttgaaacactctttttctagaatctgcaagtagatatttggagcgcttggaggccttctttggaaaccggaatatcttcacaggaaatgtagatagaggcattctcagaaactttttttgtgatatgtagattcaactcacagcgttgaacctttctttggatggagcagttttgaaaacctcttttatcgaatctgcaggtaaacatttggggtgctttgagggctgtggtgcaaaaggaaatgtcttcccatagaaactagactgaaacattctcagcaacttctttgtgacgtttgcattcatctcacagcattgaacatacctttccaaagagtagttttgaaacactatttttgtagaatctgcaagtggatatttggactgctttgaggccttcatcggaaacgggaatatcttcacataaacactagagagaagcattctcagaaacttctttgtgatctgtccattcaactcacagagttgaaccttccttttaatggagcagttttgaaacactgtttttggagaatcttcaagtagctatttggagcgctttgtggcctatggtagaaaaagaaatatctgcctataacaactagacagaagcattctgagaaacttctttgtgatgtttgcattcaactaccagaggtgaaccttccttttgatagggcagtttggaaacactctttttgtagaatctgcatgtggatatctggagcgatttgaggcctacggtccaaaaggaaatctcttcctgggaaaaatagacgaaagcattctcagaaactgctttgtgatatgtgcattcgactctccgagttgaaacttttttttgatagagcagttttgaaacactctgtagaatctgaaagtggatatttggagctctttgagggctatggcggaaaagaaaatatattcacattaaactagacagaagcattcccagaaacttctttaggatgtttgcagtaaactcacagagttgaacatacctttccgtagagcagttttgaaacactctgtttgtgggatccgcaagtggatatttggaccgctttgagacctttgctggaaacgggaatatcttcacatataaactggacagaagcattctcagaaacttcttcgtgatgtgtgcattctactcccaaatttgaatcttccttttcatgaagcagttttgaaacactctgtttgtgcaatccacaattggataattggaacgctttgatgcccatggtagaaaaggaaatatcttcatataaaaactagacacaaggattcacagaaaatgctttgtgatgtgtgcattcaaatcacggagttgaatctttcttttgtcagagcagttttgaaacactgtttctgtggaatctgccagcggacacttggagcgctttgagggctacggtggagaaggaaatatcttcccataaaaactagaaagaagcattctcagaaacatttatgtgaagcgtgcattccactcacagagttgaaccttccttttgatacaacagttttgaaacactcttttgaacaattgcaggtgaatctttggagcgctttgaagcctttgttggaaatgggaatatcttcacacacaaactagccagaagcattctcagaaacttctttgtgatgtgtgcgttgaacccagagagatgaacctttcctttgaaagagcagttttgaaacgtgtttttgtaagatctgcaagcggatagttggcttcgctttgtgtcctttgctggaaacgggaatatcttctaataaaaactagacagaaatattctcagaatcttctttgtgatgtgggcattcaactaacagagttgaacgtttcttttcacagagcagttttgaaacactcttttggtagaatctgtcagtggatatttggagcgctttgagggctattgtgccaacggaaatatctgcccctaaaaactagacagaagcattctcagaaactacttcgtgatgttcgcattcaactcacagagttgaacatacctcttcatagagcagatttgaaaacctctttctgtagaatctgcaagtggatattcggaccactttgaggccttcataggaaacagtaatatcttcacataaaaactagatagaagcattgtcagaaagttcttggtgatgtgtgaattcaactcacagagttgaaccttcctttaatagagcagttttgaaacactctttttctagaatctgcaagtagatatttggagcgctttgaggccttcgttggaaaccggaatatcttcacaggaaaagtagatagaggcattctcagaaacttttttgtgatatgtagattccactcacagcgttgaacctttctttggatggagcagttttgaaaaactcttttatcgaatctgcaggtagacatttggggtgctttgagggctgtggtgcaaaaggaaatgtcttcccatagaaactagactgaagcattctcagcaacttcttggtgacgtttgcattcatctcacagtgttgaacatacctttccatagagtggttttgaaacactgtttctgtagaatcggcaagtggatatttggactgctttgaggccttcatcggaaacgggaatatcttcacataaacactagagagaagcattctcagaaacttctttgtgatctgtccattcaactcacagagttgaaccttccttttcatggagcagttttgaaacactgtttgtggagaatctgcaagtggatatttggagcgccttgaggccaatggtagaaaaagaaatatctgcctctaaatactagactgaagcattccgagaaacttctctgtgatgtttgcattcaactagcagagttgaaccttccttttgatagggcagtttggaaacactctttttgtagaatctgcatgtggatatctggagcggtttgaggcctacggtcaaaaaggaaatatcttcctgggataaatagacgaaagcattctcagaaactgctttgtgatatgtgcattccactcaccgagttgaaactttttttgatagagcagttttgaaacactttgtagaatctcaaagtggatatttggagctctttgagggctatggcggaaaagaaaatatattcacattaaacttgacatcagcattctcagaaacttatttatgatgtttgcactaaactcacagagttgaacatacctttccgtagagcagttttgaaacactctgtttgtgggatccgcaagtggatatttggaccgctttgagacctttgctggaaatgggaatatcttcacatataaactagacagaagcattctcagaaacttcttcgtcacgtgtgcattctactcccagctttgaatcttccttctcatgaagcagttttgaaagactctatttgtgcaatctacaattggataattggaacgctttgatgcccatggtagagaaggaaatatcctcatataaaaactagacagaaggattcacagaaaatgctttgtgatgtgtgcattcaaatcacggagttgaatctttcttttgttagagcagttttgaaacactgtttctgtggaatctgccagcggacacttggagtgctttgagggctgtggtggagaaggaaatatcttcccataaaaactagaaagaggcattctcagaaacttttgtgtgatatgtagattcaactcacagcgttgaaccttccttttgatagaacagttttgaaacactcttttgaacaattgtaggtgaatatttcgagggctttgaagcctttgttggaaatgggaatatcttcacacacaaagtagccagaagcattctcagaaacttctttgtgaggtgtgcgttgaacccagagagaagaacctttcctttgatagagcagttttgaaacgtgtttttgtaagatcggcaagcggataattggcttcgctttgtgtcctttggtggaaacgggaatatcttctaataaaaactagacagaaatattctcagaatctcctttgtgatgtgggcattcaactaacacagttgaacatttcttttcacagagcagttttgaaacactcttttggtagaatctgccagtggatatttggagcgctttgagggctgttgtgccaatggaaatatctgcccctaaaatctagacagaagcattctcagaaactgcttcgtgatgtttgcattcaactcacagggttgaacatacctctgcatagagctgttttgaaaacctctttttgtagaatctgcaagtggatattcggaccactttgaggccttcataggaaacagtaatatcttcacataaaaactagatagaaatattctcagaatcttctttgtgatgtgggcattaaactcacagatttgaaccttcctttaatagagcagttttgaaacacactttttctagaatcggcaagtagatctttggagcgctttgaggccttcgttggaaaccggaatatcttcacaggaaaagtagatagaggcattctcagaaactttttcgtgatatgtggattcaactcacagcgttgaacctttcttttgatagagcagttttgtaaaactcttttatcgaatctgcaagtagacatttggagtgctttgagggctgtggtgcaaaaggaaatgtcttcccatagaaagtagactgaagcattctcagcaacttctttgtgacgtttgcattcatctcacagtgttgaacatacctttccatagagaagttttgaaacactaattttgtagaatctgcaagtggatatttggagtgctttgaggccttcatcggaaacgggaatatcttcacataaacactagacagaagcattctcagaaacttctttgtcatctgtccattcaactcacagagttgcaccttcctttttatggagcagttttgaaacactccttttggagaatctgcaagtggatatttggagcgctttgaggcctatggtagaaaaagaaatatctgcctctaaaaaccagacagaagcattccgagaaaagttctttgtgatgtttgcattcaactagcacagttgaaccttccttttgatagggcagtttggaaacactctttttgtagaatctgcatgtggatatctggagcggtttgaggcctacggtcaaaaaggaaatatcttcctgggaaaaatagacgaaagcattctcagaaactgctttgtgatatgtgcattcgactcaccgaattgcaactttttttggatagagcagttttgaaacactctgtagaatctgaaagtggatatttggagctctttgagggctatggcggaaaagaaaatatattcactttaaactagacagcagcattctcagaaacttctttaggatgtttgcagtaaactcacagagttgaacatacctttccgtagagcagttttgaaacactctgtttgtgggatccgcaagtggatatttggaccgctttgagacctttgctggaaatggcaatatcttcacgtataaactagacagaagcattctcagaaacttcttcgtgaagtgtgcagtctactccggaatttgaatcttccttttcatgaagcagttttgaaacactctgtttgtgcaatccacaattggataattggaacgctttgatgcccatggtagaaaaggaaatatactcatataaaaactagacagaaggattcacagaaaatgctttgtgatgtgtgcattcaaatcacagagttgaatctttcttttgttagagcagttttgaaacactgtttctgtggaatctgccagcggacacttggagcgctttgagggctacggtggagaaggaaatatcttcacataaaaactagaaagaagcattctcagaaacatttatgtgaagcgtgcattcaactcacagagttgaaccttccttttgatagaacagttttgaaacactcttttgaacaattgcaggtgaatctttggagcgctttgaagcctttgttggaaatgggaatatcttcacacacaaactagccagaagcattctcagaaacttctttgtgatgtgtgcgttgaacccagagagatgaacctttcctttgatagagcagttttgaaacgtgtttttgtaagatcggcaagcagataattggcttcgctttgtgtcctttggtggaaacgggaatatcttctaataaaaactagacagaaatattctcagaatctcctttgtgatgtgggcattcaactaacacagttgaacatttcttttcacagagcagttttgaaacactcttttggtagaatctgccagtggatatttggagcgcttggagggactactgtgccaatggaaatatctgcccctgaaaactagacagaagcattctcagaaactacttcgtgatgtttgcaatcaactcacagagttgaacatacctcttcacagagcagttttgaaaacctctttttgtagaatctgcaagtggatattcggagcactttgaggccttcataggaaacagtaatatcttcgcataaaaactagatagaagcattgtcaggaagttctttgtgatgtgtgaattcaactcacagagttgaaccttcctttaatagagcagttttgaaacactctttttctagaatctgcaagtagatatttggagcgcttggaggccttcgttggaaaccggaatatcttcacaggaaatgtagatagaggcattctcagaaactttttcgtgatatgtggattcacctcacagcgttgaacctttcttttgatagagcagttttggaaaactcttttatcgaatctgcaagtagacatttggagtgctttgagggctgtggtgcaaaaggaaatgtcttcccatagaaactagactgaagcattctcagcaacttcttggtgacgtttgcattcatctcacagttttgaacatacctttccatagagtggttttgaaacactgtttttgtataatcggcaagtggatatttggactgctttcaggccttcatcggaaacgggaatatcttcacataaacactagagagaagcattctcagaaacctctttgtggtctgtccattcaactcacagagttgaaccttcctttttatggagcagttttgaaaccctgtttttggagaatctgcaagtggatatttggagcgctttgaggcctatggtagaaaaagaaatatctgcctatgacaactagacagaagcattccgagaaaagttctttgtgatgtttgcattcaactaccagagttgaaccttccttttgatagggcagtttggaaacactctttttgtagaatctgcatgtggatatctggagcggtttgaggcctacggtcaaaaaggaaatatcttcctgggaaaaatagacaaaagcattctcagaaactgctttgtgatatgtgcattcgactcaccgagttgaaacttttttttgatagagcagatttgaaactctctgtagaatctgaaagtggatatttggagctctttgagggctatggcggaaaagaaaagatattcacattaaactagacagcagcattcccagaaacttctttaggatgtttgcagtaaactcacagagttgaacatacctttccgtagagcagctttgaaacactctctttgtgggatccgcaagtggatatttggactgctttgagacctttgctggaaacgggaatatcttcacatataaactggacagaagcattctcagaaacttcttcgtgatgtgtgcattctactcccgaatttgaatcttccttttcatgaagcagttttgaaacactctgtttgtgcaatccacaattggataattggaacgctttgatgcccatggtagaaaaggaaatatcctcatataaaaactagacacaaggattcacagaaaatcctttgtgatgtgtgcattcaaatcacggagttgaatctttcttttgtgagagcagttttgaaacactgtttctgtggaatctgccagcggactcttggagctctttgagggctatggtggagaaggaaatatcttcccataaaaactagaaagaagcattctcagaaacatttatgtgaagcgtgcattcaactcacagagttgaaccttcgttttgatacaacagttttgaaacactcttttgaacaattgcaggtgaatctttggagcgctttgaagcctttgttggaaatgggaatatcttcacacacaaactagccagaagcattctcagaaacttctttgtgatgtgtgcgttgaacccagagagatgaacctttccttggatagagcagttttgaaacgtgtttttgtaagatctgcaagcggataattggcttcgctttgtgtcctttggtggaaacgggaatatcttctaataaaaactagacggaaatattctcagaatctcctttgtgatgtgggcattcaactaacacagttgaacatttcttttcacagagcagttttgaaacactcttttgggagaatctgccagtggatatttggagcgcttggagggctattgtgccaatggaaatatctgcccctggaaactagacagaagcattctcagaaactacattgtgatgtttgcattcgaatcacagagttgaacatacctcttcatagagcagttttgaaaaccttttttgtagaatctgaaagtggatattcggaccactttgaggccttcataggaaacattaatatcttcacataaaaactagatagaagcattgtcagaaagttctttgggatgtgtgaattcaactcacagagttgaaccttcctttaatagagcagttttgaaacactctttttctagaatctgcaagtagatatttggagcgctttcaggccttctttggaaaccggaatatcttcacataaaaagtagatagaggcattctcagaaactttttcgtgatatgtggattcaactcacagcgttgaacctttcttttgatagagcagttttgtaaaactcttttatcgaatctgcaagtagacatttggactgctttgagggctgtggtgcaaaaggaaatgtcttcccatagaaactagactgaagcattctcagcaacttcttggtgacgtttgcattcatctcacagtgttgaacatacctttccatagagtagttttgaaacactgtttgtgtagaatcggtaagtggatatttggactgctttgaggccttcatcggaaacgggaatatcttcacataaacactagagagaagcattctcagaaacttctttgtgatctgtccattcaactcacagagttgaaccttcctttttatggagcagttttgaaacactgtttttggaggatctgcaagtggatatttggagcaatttgaggcctatggtagaaaaagaaatatctgcctctaaaaactagacagaagcattccgagaaactcctctgtgatgtttgcattgaactagcagagttgaaccttccttttgatagggcagtttggaaacactctttttgtagaatctgcatgtggatatctggagcggtttgaggcctacggtcaaaaaggaaatatcttcctgggaaaaatagacgaaagcattctcagaaactgctttgtgatatgtgcattcgactcaccgatttgaaacttttttttgatagagcagttttgaaacactctgtagaatctgaaagtggatatttggagctctttgagggctatggcggaaaagaaaatatattcacattaaactagacagcagcattctcagaaacttctttaggatgtttacagtaaactcacagagttgaacatacctttccgtagagcagttttgaaacactctgtttgtgggatccgcaagtggatatttggaccgctttgagacctttgctggaaatgggaatatcttcacatataaactagacagaagcattctcagaaacttcttcgtgatgtgtgcattctactcccgaatttgaatcttcctttttatgaagcagttttgaaacactctgtttgtgcaatccacaattggataattggaacgctttgatgcccatggtagaaaaggaaatatcctcatataaaaactagacagaaggattcacagaaaatgctttgtgatgtgtgcattcaaatcacggagttgaatctttcttttgttagagcagttttgaaacactgtttctgtggaatctgccagcggacacttggagcgctttgagggctacggtggagaaggaaatatcttcacataaaaaatagaaagaagcattctcagaaacatttatgtgaagcgtacattcaactcacagagttgaaccttccttgtgatacaacagttttgaaacactcttttgaacaattgcaggtgaatctttggagcgctttgaagcctttgttggaaatgggaatatcttcacacacaaactagccagaagcattctcagaaacttctttgtgatgtgtgcgttgaacccagagagatgaacctttccttggatagagcagttttaaaacgtgtttttgtaagatctgcaagcggataattggcttcgctttgtgtcctttggtgggaacgggaatatcttctaataaaaactagacagaaatattctcagaatctcctttgtgatgtgggcattcaactaacacagttgaacatttcttttcacagagcagttttgaaacactcttttggtcgaatctgccagtggatatttggagcgctttgagggctgttgtgccaatggaaatatctgcccctaaaatctagacagaagcattctcagaaactgcttcgtgatgtttgcattcaactcacagacttgaacatacctctgcatagagcagttttgaaaacctctttttgtagaatctgcaagtggatattcggaccactctgaggccttcatgggaaacagtaaaatcttcacataaaaactagatagaagcattgtcagaaagttctttgtgatgtgtgaattcaactcacagagttgaaccttcctttaatagagcagttttgaaacactctttttctagaatctgcaagtagatatttggagcgctttgaggccttcgttggaaaccggaatatcttcacataaaacgtagatagaggcattctcagaaacttttttgtgatatgtagattcaactcacagcattgaacctttctttggatggagcagttttgaaaaacccttttatcgaatctgcaggtagacattcggggtgctttgagggctgtggtgcaaaaggaaatgtcttcccatagaaactagactgaagcattctcagcaacttctttgtgacgtttgcattcatctcacagtgttgaacatacctttccatagagtagttttgaaacactatctttgtagaatctgcaagtggatatttggactgctttgaggccttcatcggaaacgggaatatcttcacataaacactagagagaagcattctcagaaacttctttgtcatctgtccattcaactcacagagttgaaccttcctttttatggagcagttttgaaacactccttttggagaatctgcaagtggatatttggagcgctttgaggcctattgtagagaaagaaatatctgcctctaaaaaccagacagaagcattccgagaaacttctttgtgatgtttgcattcaactagcagagttgaaccttccttttgatagggaagtttggaaacactctttttgtagaatctgcatgtggatatctggagcggtttgaggcctacggtcaaaaaggaaatatcttcctgggaaaaatagacgaaagcattctcagaaagtgctgtgtgatatgtgcattcgactcaccgagttgaaacttttttttgatagagcagttttgaaacactctgtagaatctgaaagtggatatttggagctctttgagggctatggcggaaaagaaaatatattcacattaaagtagacagcagcattctcagaaacttctttaggatgtttgcagtaaactcacagagttgaacatacctttccgtagagcagttttgaaacactctgtttgtgggttccgcacgtggatatttggaccgctttgagacctttgctggaaatgggaatatcttcacatataaactagacagaagcattctcagaaacttcttcgtgatgtgtgcattctcctcccgatttcgaatcttccttttcatgaagcagttttgaaacactctgtttgtgcaatccacaattggataattggaacgctttgatgcccatggtagaaaaggaaatatcctcatataaaaactagacagaaggattcacagaaaatgctttgtgatgtgtgcattcaaatcacagagttgaatctttcttttgtcagagcagttttgaaacactgtttctgtggaatctgccagcggacacttggagcgctttgagggctgtggtggagaaggaaatatcttcccataaaaactagaaagaagcattctcagaaacatttatgtgaagcgtgcattcaactcacagagttgaaccttccttttgatagaagagttttgaaacactcttttgaacaattgcaggtgaatctttggagcgctttgaagcctttgttggaaatgggaatatcttcacacacaaactagccagaagcattctcagaaacttctttgtgatgtgtgcgttgaacccagagagatgaacctttcctttgatagagcagttttgaaacgtgtttttgtaagatcggcaagcggataactggcttcgctttgtgtcctttggtggaaacgggaatatcttctaataaaaactagacagaaatattctcacaatcatctttgtaatgtgggcattcaactaacacagttgaacatttcttttcacagagcagttttgaaacactcttttgctagaatctgccagtggatacttggagcgctttgagggctattgtgccaatggagatatcttcccctaaaaactagacagaagcattctcagaaactgctttgggatgtttgcattcaactgacagagttgaacatacctcttcatagagcagttttgaaaacctctttttgtagaatctgcaagtggatattcggaccactttgaggccttcataggaaacagtaatatcatcacataaaaactagatagaaggattgtcagaaagttctttgtgatgtgtgaattcaactcacagagttgaaccttcctttaatagagcagttttgaaacagtctttttctagaatctgccagtagatatttggagcgctttgaggccttcgttggaaaccggaatatcttcacataaaaagtagatagaggcattctcagaaacttttttgtgatatgtagattcaactcacagcgttgaacctttctttggatggagcagttttgaaaaactcttttatcgaatctgcaggtagacattcggggtgctttgagggctgtggtgcaaaaggaaatgtcttcccatagaaactagactgaatcattctcagcaacttcttggtgacgtttgcattcatctcacagtgttgaacatacctttgcatagagtagtttcaaaacactatttttgtagaatctgcaagtggacatttggactgctttgaggccttcatcggaaacgggaatatcttcacataaacactagacagaagcattctcagaaacttctttgtgatctgcccattcaactcacagagttgaaccttcctttttatggagcagttttgaaacactgtttttggagaatctgcaagtggatatttggagcgctttgaggcctatggtaggaaaagaaatatctgcctctaaaaactagacagaagcattccgagaaacttctttgtgatgtttgcattcaactagcagagttgaaccttccttttgatagggcagtttggaaacactctttttgtagaatctccatgtggatatctggagcggtttgaggcctacggtcaaaaaggaaatatcttcctgggaaaaatagacgaaagcattctcagaaactgctttgtgatatgtgcattcgactcaccgatttgaaactttttttggatagagcagttttgaaacactctgtagaatctgaaagtggatatttggagctctttgagggctatggcggaaaagaaaatatattcacattaaactagacagcagcattctcagaaacttctttaggatgtttgcagtaaactcacagagttgaacatacctttccgtagagcagttttgaaaccctctgtttgtgggatccgcaaggggatatttggaccgctttgagacctttgctggaaatgggaatatcttcacatataaactagacagaagcattctcagaaacttcttcgtgatgtgtgcattctactcccgaatttgaatcttccttttcatgaagcagttttgaaacaatctgtttgtgcaatccacaattggataattggaacgctttgatgcccatggtagaaaaggaaatatcctcatataaaaactagacagaaggattcacagaaaatgctttgtgttgtgtgcattcaaatcacggagttgaatctttcttttgtcagagcagttttgaaacactgtttctgtggaatctgccagcggacacttggagcgctttgagggctgtggtggagaaggaaatatcttcccataaaaactagaaagaagcattctcagaaacatgtatgtgaagcgtgaattcaactcacagtgttgaaccttccttttgatagaacagttttgaaacactcttttgaacaattgcaggtgaatctttggagcgctttgaagcctttgttggaaatgggaatatcttcacacacaaactagccagaagcattctcagaaacttctttgtgatgcgtgcgttgaacccagagagatgaacctttcctttgatagagcagttttgaaacgtgtttttgtaaggtctgcaagcggataatcgacttcgctttgtgtcctttggtggaaacgggaatatcttctaataaaaactagacagaaatattctcagaatctcctttgtgatgtgggcattcaactaacacagttgaacatttcttttcacagagcagttttgaaacactcttttggtagaatctgccagtggatatttggagcacttggagggctattgtgccaatggaaatatctgcccctgaaaactagacagaagcattctcagaaactacttcatgatgtttgcattcaactcagagagttgaacatacctcttcacagagcagttttgaaaacctctttttgtagaatctgcaagtggatattcggagcactttgaggccttcataggaaacagtaatatcttcgcataaaaactagatagaagcattgtcagaaagttctttgtgatgtgtgaattcaactcacagagttgaaccttcctttaatagagcagtttcgaaacactctttttctagaatctgcaagtagatatttggagcgctttgaggccttcgatgaaaaccggaatatcttcacaggaaaagtagatagaggcattctcagaaactttttcgtgatatgtggattcaactcacagcgttgaacctttcttttgatagagcagtgttgtaaaactcttttatcgaatctgcaagtagacatttggagtgctttgggggctgtggtgcaaaaggaaatgtcttcccatagaaactagactgaagctttctcagcaacttcttggtgacgtttgcattcatctcacagtgttgaacatacctttccatagagtggttttgaaacactgtttttgtagaatcggcaagtggatatttggactgctttgaggccttcatcggaaacgggaatatcttcacataaacactagagagaagcattctcagaaacttctttgtgatctgtccattcaactcacagagttgaaccttcctttttatggagcagttttgaaacactgtttgtggagaatctgcaagtggatatttggagcgccttgaggccaatggtagaaaaagaaatatctgcctctaaatactagactgaagcattctgagaaacttctttgtgatgtttgcattcaactaccagagttgaaccttccttttgatagggcagtttggaaacactcatttgtagaatctgcatgtggatatctggagcgatttgaggcctacggtcaaaaaggaaatatcttcctgggaaaaatagacgaaagcattctcagaaactgctttgtgatatgtgcattccactctccgagttgaaacttttttttgatagagcagttttgaaacactctgtagaatctgaaagtggatatttggagctctttgagggctatggcggaaaagaaaatatattcacattaaagtagacagcagcattctcagagacttctttaggatgtttgcagtaaactcacagagttgaacatacctttccgtaaagcagttttgaaaccctctgtttgtgggatctgcaagtggatatttggaccgctctgagacctttgctggaaatgggaatatcttcacatataaactagacagaagcattctcagaaacttcttcgtgatgtgtgcattctactcccaaatttgaatcttccttctcatgaagcagttttgaaacactctatttgtgcaatctacaattggataattggaaccctttgatgcccatggtagaaaaggaaatatcctcatataaaaactagacagaaggattcacagaaaatgctttgtgatgtgtgcattcaaatcacggagttgaatctttcttttgttagagcagttttgaaacactgtttctgtggaatctgccagcggacacttggagcgctttgagggctacggtggagaaggaaatatcttcacataaaaactagaaagaagcattctcagaaccatttatgtgaagcgtgcattcaactcacagagttgaaccttccttttgatagaacagttttgaaacactcttttgaacaattgcaggtgaatatttggagggctttgaagcctttgttggaaacgggaatatcttcacacaccaactagccagaagcattctcagaaacttgtttgtgatgtgtgcgttgaacccagagagatgaacctttccttcgatagagcagttttgaaacgtgtttttgtaagatcggcaagcggataattggcttcgctttgtgtcctttggtggaaacgggaatatcttataataaaaactagacagaaatattctcagaatcttctttgtgatgtgggcattcaactaacacagttgaacgtttcttttcacagagcagttttgaaacactcttttggtagaatctgtcagtggatatttggagcgctttgagggctattgtgccaacggaaatatctgcccctaaaaactagacagaagcattctcagaaactgcttcgtgatgtttgcattcaactcacagacttgaacatacctctgcatagagcagttttgaaaacctctttttgtagaatctgcaagtggatattcggaccacattgaggccttcataggaaacagtaatatcttcacataaaaactagatagaagcattgtcagaaagttctttgtgatgtgtgaattcaactcacagagttgaaccttcctttaatagagcagttttgaaacactctttttctagaatctgcaagtagatatttggagcgctttgaggccttcgttggaaaccggaatatcttcacataaaaagtaggtagaggcattctcagaaacttttttgtgacatgtagattcaactcacagcgttgaacctttcttttgatagagcagttttgaaaaactcttttatcgaatctgcaagtagacatttggagtgctttgagggctgtggtgcaaaaggaaatgtcttcccatagaaactagactgaagcattctcagcaacttctttgtgacgtttgcattcatctcacagtgttgaacatacctttccatagagtagttttgaagcactatttttgtagaatctgcaagtggatatttggactgctttgaggccttcatcggaaacgggaataccttcacataaacactagacagaagcattctcagaaacttctttgtggtctgtccattcaactcacagagttgaaccttcctttttatggagcagttttgaaacactgtttttggaggatctgcaagtggatatttggagcgctttgaggcccatggtagaaaaagaaatatctgcctatgacaactagacagaagcattccgagaaacttccttgcgatgtttgcattcaactagcagagtagaaccttccttttgatagggcagtttggaaacactctttttgtagaatctgcatgtggatatctggagcggtttgaggcctacggtcaaaaaggaaatatcttcctgggaaaaatagacgaaagcattctcagaaactgctttgtgatatgcgcattcgactcacctagttgaaacttttttttgatagagcagttttgaaacactctgtagaatctgaaagtggatatttggagctctttgagggctatggcggaaaagaaaatatattcacattaaagtagacagcagcattcccagaaacttctttaggatgcttgcagtaaactcacagagttgaacatacctttccgtagagcagttttgaaacactctgtttgtgggatccgcaagtggatatttggaccgctttgagacctttgctggaaacgggaatatcttcacatataaactagacagaagcattctcagaaacttcttcgtgatgtgtgcattctactcccaaatttgaatcttccttttcatgaagcagttttgaaacactctatttatgcaatctacaattggataattggaacgctttgatgcccgtggtagaaaaggaaatatcctcatataaaaactagacagaaggattcacagaaaatgctttgtgatgtgtgcattcaaatcacggagttgaatctttcttttcttagagcagttttgaaacactgtttctgtggaatctgccagcggacacttggagcccttggaacgctatggtggagaaggaaatatcttcacataaaaactagaaagaagcattctcagaaacatttatgtgaagcgtgcattcaactcacagagttgaacatttcgtttgatagaacagttttgaaacactcttttgaacaattgcaggtgaatctttggagcgctttgaagcctttgttggaaataggaatatattcacacacaaactagccagaaacattctcagaaacttctttgtaatgtgtgcgttgaacccagagagatgaacctttcctttgatagagctgttttgaaacgtgtttttctaacatctgcaagcggataattggcttcgcgttgcgtcctttggtggaaacgggaatatcttctaataaaaactagacagaaatattctcagaatcttctttgtgatgtgggcattcaactaacacagttgaacatttcttttcacagagcagttttgaaagactcttttggtagaatctgccagtggatatttggagcgctttgagggctattgtgccaatggaaatatcttcccctaaaaactagacagaagcattctcagaaactgcttcgtgatgtttgcattcaactcacagggttgaacatacctctgcatagagcagttttgaaaacctctttttgaagaatctgcaagtggatattcggaccactttgaggccttcataggaaacagtaatatcttcacataaaaactagatagagtaagcattgtcagaaagttctttgtgatgtgtgaattcaactcacagagttgaaccttcctttaatagagcagttttgaaacactcttcttctagaatctgcaagtagatatttggagcgctttgaggccttcgttggaaaccggaatatcttcacagaaaaagtagatagaggcattctcagaaactttttttgtgatatgtagattcaactcacagcgttgaacctttctttggatggagcagttttgaaaacctcttttatcgaatctgcaggtagacattcggggtgctttgagggctgtggtgcaaaaggaaatgtcttcccatagaaactagactgaagcattctcagcaacttcttggtgacgtttgcattcacctcacagtgttgaacatacctttccatagagtggttttgaaacactgtttttgtagaatcggcaagtggatatttggactgctttgaggccttcatcggaaacgggaatatcttcacataaacactagagagaagcattctaagaaacttctttgtgatctgtccattcaactcacagagttgaaccttcctttttatggagcagttttgaatcactgtttttggagaatctgcaagtggatatttggagcgatttgaggcctatggtagaaaaagaaatatctgcctctaaaatccagacagaagcattctgagaaacttctctgtgatgtttgcattcaactaccagaggtgaaccttccctttgatagggcagtttggaaacactcatttggagaatctgcatgtggatatctggagcgatttgaggcctacggtccaaaaggaaatatcttcctgggaaaaatagacgaaagcattctcaggaactgctttgtgatatgtgcattcgactctccgagttgaaactttttttggatagagcagctttgaaacactctgtagaatctgaaagtggatatttggagctctttgagggctatggcagaaaagaaaagatattcacattaaactagacagcagcattcccagaaacttctttaggatgtttgcagtaaactcacagagttgaacatacctttccgtagagcagctttgaaacactctgtgtgtgggatccgcaagtggatatttggaccgctttgagacctttgctggaaacgggaatatcttcacagataaactggacagaagcattctcagaaacttcttcgtgatgtgtgcattctactcccaaatttgaatcttccttttcatgaagcagttttgaaacactccgtttgtgtaatctacaattggataactggaacgctttgatgcccattgtagaaaaggaaataacctcatataaaaactagacagaaggattcacagaaaatgctttgtgatttgtgcattcaaatcacggagttgaatctttcttttgttagagcagttttgaaacactgtttctgtggaatctgccagcggacacttggagcgctttgagggctatggtggagaaggaaatatcttcacataaaaactagaaagaggcattctcagaaacttttgtgtgatatgtagattcaactcacagcgttgaaccttccttttgatagaacagttttgaaacactcttttgaacaattgcaggtgaatatttggagcgctttgaagcctttgttggaaatgggaatatcttcacacacaaagtagccagaagcattctcagaaacttctttgtgatgtgtgcgttgaacccagagagatgaacctttcctttgatagagcagttttgaaacgtgtttttgtaagatcggcaagcggataattggcttcgctttgtgtcctttcgtggaaacgggaatatcttctaataaaaactagacagaaatattctcagaatctcctttgtgatgtgggcattcaactaacacagttgaacatttcttttcacagagcagttttgaaacactcttttggtagaatctgccagtggatatttggagcgcttggagggctgttgtgccaatggaaatatctgcccctgaaaactagacagaagcattctcagaaactgctttgtgatgtttgcattcaactcacagagttgaacataccttttcatagagcagttttgaaaacctctttttgtagaatctgcaagaggatattcggaccactttgaggccttcataggaaacagtaatatcttcacataaaaactagatggaagcattgtcaggaagttctttgtgatgtgtgaattcaactcacagagttgaactttcctttaatagagcagtgttgaaacactctttttctagaatctgcaagtagatatttggagcgcttggaggccttcgttgtaaaccggaatatcttcagaggaaatgtagatagaggcattctcagaaactttttcgtgatatgtggattcaactcacagcgttgaacctttcttttgatagagcagttttgtaaaactcttttatcgaatctgcaagtagacatttggagtgctttggaggctgtggtgcaaaaggaaatgtcttcccatagaaactagactgaagcattctcagcaacttccttgtgacgtttgcattcatctcacagtgttgaacatacctttccatagagcagttttgaaacactatttttgtagaatctgcaagtggatatttggactgctttgaggccttcatcggaaacgggaatatcttcacataaacactagacagaagcattctcagaaacttctttgtggtctgtccattcaactcacagagttgaaccttcctttttatggagcagttttgaaacactgtttttggaggatctgcaagtggatatttggagcgctttgaggcctatggtagaaaaagaaatatcggcctatgacaactagacagaagcattctgagaaacttctttgtgatgtttgcattcaactaccagagttgaaccttccttttaatagggcagtttggaaacactctttttgtagaatctgcatgtggatatctggagcgatttgaggcctacggtccaaaaggaaatatcttcctgggaaaaatagacgaaagcattctcagaaactgctttgtgatatgtgcattcgactgaccgagttgaaacttttttttgatagagcagttttgaaacactctgtagaatctgaaagtggatatttggagctctttgagggctatggcggcaaagaaactatattcacattaaagtagacagcagcattctcagaaacttctttaggatgtctgcagtaaactcacagagttgaacatacctttccgtagagcagttttgaaacactctgtttgtggggtccgcaagtggatatttggacagctttgagatctttgctggaaatgggaatatcttcacatataaactagacagaagcattctcagaaacttcttcgtgatgtgtgcattctactcccgaatttgaatcttccttttcatgaagcagttttgaaacactctgtttgtgcaatccacaattggataattggaacactttgatgccaatggtagaaaaggaaatagcctcatataaaaactagacagaaggattcacagaaaatgctttgtgatgtgtgcattcaaatcacggagttgaatctttcttttgtcagagtagttttgaaacactgtttctgtgggatctgccagcggacacttggagcgctttgagggctgtggtggagaaggaaatatcttcccataaaaactagaaagaagcattctgagaaccatttatgtgaagcgtgcgttcaactcacagagttgaaccttccttttgatagaacagttttgaaacactcttttgaacaattgcaggtgaatatttggagggctttgaagcctttgttggaaatgggaatatcttcacacacaaactagccagaagcattctcagaaacttctttgtgatgtgtgcgttgaacccagagagatgaacctttcctttgatagagcagttttgaaacgtgtttttgtaagatctgcaagcggataattggcttcgctttgtgtcgcttggtggaaacgggaatatcttctaataaaaactagacagaaatattctcagaatcttctttgtgatgtgggcattcaactaacacagttgaaactttctcttcacagagcagttttgatacactcttttggtagaatctgccagtggatatttggagcgctttgaggactattgtgccaacggaaatatctgcccctaaaaactagacagaagcattctcagaaattactttgtgatgtttgcattcaactcacagatttgaaaatacctcctcatagagcagttttgaaaacatctttttgtagaatctgcaagtggatattcggaccactttgaggccttcataggaaacagtaatatcttcacagaaaaactagatagaagcattgtcagaaagttctttgtaatgtgtgaattcaactcacagagatgaaccttcctttaatagagcaattttgaaacactctttttccagagtctgcaagtagatatttggagcgctttgaggccttcgttggaaaccggaataccttcacataaaaagtagatagaggcattctcagaaacttttttgtgatatgtagattcatctgacagcgttgaacctttcttttgatagagcagttttgaaaaactcttttgtcgaatctgcaagtagacatttggagtgctttgagggctgtggtgccaaaggaaatgtcttcccatggaaactagactgaagcattctcagcaacttctttgtgacgtttgcattcatctcacagtgttgaacatatctttccatagagtagttttgaaacactgtttttgtagaatcggcaagtggatatttggactgctttgaggccttcatcggaaacgggaatatcttcacataaacactagagagaagcattctcagaaacttctttgtcatctgtccattcaactcacagagttgaaacttcctttttatggagcagttttgaaacactccttttggagaatctgcaagtggatatttggagcgctttgaggcctacggtagaaaaagaaatatctgcctctaaaaaccagacagaagcattccgagaaacttctttgtgatgtttgcattcaactagcagagttgaatccttccttttgcatagggcagtttggaaactctctttttgtagaatctgcatgtggatatctggagcggtttgaggcctacggtcaaaaaggaaatatcttcctgggaaaaatagacgaaagcattctcagaaactgctttgtgatatgtgcattcgactcaccgagttgaaacttttttttgatagagcagttttgaaacactctgtagaatctgaaagtggatatttggagctctttgagggctatggcggaaaagaaactatattcacattaaagtagacagcagcattcccagaaacttctttaggatgtttgcagtaaactcacagacttgaacatacctttccgtagagcagttttgaaacactctgtttgtgggatccgcaagtggatatttggacccctttgagacctttgctggaaacgggaatatcttcacatataaactagacagaagcattctcagaaatttcttggtgatgtgtgcattgtactcccaaatttgaatcttccttctcatggagcagttttcaaacactctgtttgtgcaatctacaattggagaattggaacgctcggaggcccgtggtagaaaaggaaatatcctcatataaaaactagacagaaggattcacagaaaatgctttgtgatgtgtgcattcaaatcacggggttgaatctttcttttgttagagcagttttgaaacactgtttctgtggaatctgccagcggacacttggagcgctttgagggccatggtggagaaggaaatatctttccataaaaactagaaagaagcattctcggaaacatttatgtgaagcatgcattcaactcacagagttgaaccttccttttgatagaacagttttgaaacactctttttaacaattgcaggtgaatctttggagcgctttgaaggctttgttggaaatgggaatatcttcacacacaaactagccagaagcattctcagaaacttctttgtgatgtgtgcgttgaacccagagagatgaacctttcctttgatagagcagtttggaaacgtgtttttgtaagatctgcaagctgataattggcttcgctttgtgtcctttggtggaaacgggaatatcttctaataaaaactagacagaaatattctcagaatcttctttgtgatgtgggcattcaactaacacagttgaacctttcttttcacagagcagtttggaaacacccttttggtagaatctgccagtggatatttggagcgctttcagggctattgtgccaacggaaatatctgcccctaaaaactagacagaagcattctcagaaactgcttcgtgatgtttgcattcaactcacagggttgaacatacctctgcatagagcagttttgaaaacctctttttgtagaatctgcaagtggatattcggaccactttgaggccttcataggaaacagtaatatcttcacataaaaactagatagaagcattgtcagaaagttctttgtgatgtgtgaattcaactcacagcgttgaaccttcctttattagagcagttttgaaacactctttttctagaatctgccagtagatatttggagcgctttgaggccttcgttggaaaccggaatatcttcacataaaacgtagatagaggcattctcagaatctctttgtgatatgtagattcaactcacagcgttgaacctttctttcgatggagcagttttgaaaaactcttttatcgaatctgcaggtagacatttggggtgctttgagggctgtggtgcaaaaggaaatgtcttcccatagaaactagactgaaagcattctcagcaacttctttgtgacgtttgcattcatctcacagtgttgaacatacctttccatagagtagttttgaaacactgtttttgtagaatcggccagtggatatttggactgctttgaggccttcatcggaaacgggaatatcttcacataaacactagagagaagcattctcagaaacttctttgtgatctgtccattcaactcacagagttgaaccttcctttttatggagcagttttgaaacactcctttgggagaatctgcaggtggatatttggagcgctttgaggcctatggtagaaaaagaaatatctgcctctaaaaaccagacagaagcattccgagaaacttctttgcgatgtttgcattcaactagcagagttgaactttccatttgatagggcagtttggaaacactctttttgtagaatctgcatgtggatatctggagcggtttgaggcctatggtcaaaaaggaaatatcttcctgggaaaaatagacgaaagcattctcagaaactgctttgtgatatgcgcattcaactcaccgagttgaaacttttttttgatagagcagttttgaaacactctgtagaatctgaaagtggatatttggagctctttgagggctatggcggaaaagaaaatatattcacattaaagtagacagcagcattctcagaaacttctttaggatgtttgcagtaaactcacagagttgaacctacctttccgtagagcagttttgaaacactctgtttgtgggatccgcaagtggatatttggaccgctttgagacctttgctggaaatgggaatatcttcacatataaactagacagaagcattctcagaaacttctttgtgatgtgtgcattgtactcccaaatttgaatcttccttctcatggagcagttttgaaacactctgtttgtgcaatctacaattggataattggaacgctttgatgcccatggtagaaaaggaaatatcctcatataaaaactagacagaaggattcacagaaaatgctttgtgatgtgtgcattcaaatcacggagttgaatctttcttttgtcagagcagttttgaaacactgtttctgtggaatctgccagcgaacacttggagcgctttgagggctatggtggagaaggaaatatcttcccataaaaactagaaagaagcattctcagaaccatttatgtgaagcgtgcgttcaactcacagagttgaaccttccttttgatagaacagttttgaaacactcttttgaacaattgcaggtgaatatttggggggctttgaagcctttgttggaaatgggaatatcttcacacacaaactagccagaagcattctcagaaacttctttgtgatgtgcgcgttgaacccagagagatgaacctttcctttgatagagcagttttgaaacgtgtttttgtaagatcggcaagcggataattggcttcgctttgtgtcctttggtggaaacgggaatatcttctaataaaaactagacagaaatattctcacaatcatctttgtgatgtgggcattcaactaacacagttgaacatttcttttcacagagcagtttggaaacactcttttgctagaatctgccagtggatacttggagcgctttgagggtattgtgccaatggaaatatcttcccctaaaaactagacagaagcattctcagaaactactttgtgatgtttgcattcaactcacagagttgaacatacctcttcatagagcagttttgaaaacctctttttgtagaatctgcaagtggatattcggaccactttgaggccttcataggaaacagtaatatcttcacataaaaactagatagaaatattctcagaatcttctttgtgatgtgggcattaaactcacagatttgaaccttcctttaatagagcagttttgaaacacactttttctagaatctgcaagtagatatttggagcgctttgaggccttcgttggaaaccggaatatcttcacaggaaaagtagatagaggcattctcagaaacttttttgtgatatgtagattcaactcacagcgttgaacctttctttggatggagcagttttgaaaaactcttttatcgaatctgcaggtagacatttggggtgctttgagggctctggtgcaaaaggaaaagtcttcccatagaaactagactgaagcattctcagcaacttcttgttgacgtttgcattcatctcacagtgttgaacatacctttccatagagtggttttgaaacactgtttttgtagaatcggcaagtggatatttggactgctttgaggccttcatcggaaacgggaatatcttccataaacactagagagaagcattctcagaaacttctttgtggtctgtccattcaactcacagagttgaaccttcctttttatggagcagttttgcaacactgttttcggagaatctgcaagtggatatttggagcgctttgaggcctatggtagaaaaagaaatatctgcctatgacaactagacagaagcattctgagaaacttctttgtgatgtttgcattcaactaccagaggtgaaccttccttttgatagggcagtttggaaacactctttttgtagaatctgcatgtggatatctggagcgatttgaggcctacggtccaaaaggaaatatcttcctgggaaaaatagacgaaagcattctcagaaactgctttgtgatatgtgcattcgactctccgagttgaaactttttttggatagagcagttttgaaacactctgtagaatctgaaagtggatatttagagctctttgagggctatggcggaaaagaaaagatattcacattaaactagacagcagcattctcagaaacttctttaggatgtttgcagtaaactcacagagttgaacatacctttccgtagagcagttttgaaacactctgtttgtgggatctgcaagtggatatttggaccgctttgagacctttgctggaaatgggaatatcttcacgtataaactagacagaagcattctcagaaacttcttcgtgatgtgtgcattgttctcccaaatttgaatcttccttctcatggagcagttttgaaacactctgtttgtgcaatctacaattggagaattggaacgcttgcatgcccgtggtagaaaaggaaatatcctcatataaaaactagacagaaggattcacagaaaatgctttgtgatgtgtgcattcaaatcacggagttgaatctttcttttgttagagcagttttgaaacactgtttctgtggaatctgccagcggacacttggagcgctttgagggctgtggtggagaaggaaatatcttcccataaaaactagaaagaagcattctcagaaacatttatgtgaagcgtgcattcaactcacagagttgtaccttccttttgatacaacagttttgaaacactcttttgaacaattgcaggtgaatctttggagcgctttgaagcctttgttggaaatgggaatatcttcacacacaaactagccagaagcattctcagaaacttctttgtgatgtgtgcgttgaacccagagagatgaacctttcctttgatagagcagttttgaaacgtgtttttgtaagatcggcaagcggataattggcttcgctttgtgtcctttggtggaaacgggaatatcctctaataaaaactagacagagatattctcagaaacttctttgtgatgtgggcattcaactaacacagtcgaacatttcttttcacagagcagttttgaaacactcttttggtcgaatctgccagtggatatttggagcgctttgagggctattatgccaatggaaatatctgcccctaaaaactagacagaagcattctcagaaactgttttgtgatgtttgcattcaactcacagaggtgaacatacctcttcatagagcagttttgaaaacctctttttgtagaatctgcaagtggatattcggaccactttgaggccttcataggaaacagtaatatcttcacataaaaactagatagaagcattgtcagaaagttctttgtgatgtgtgaattcaactcacagagttgaaccttcctttaatagagcagttttgaaacactctttttctagaatctgcaagtagatatttggagcgctttgaagccttcgttggaaaccggaatatcttcacataaaaagtagatagagacatgctcagaaacttttatgtcatatgtagattcaactcacagcgttgaacctttcttttgatagagcagttttgaaaaactcttttatcgaatctgcaagtagacatttggagtgctttgagggctctggtgcaaaaggaaatgtcttcccatagaaactagactgaagcattctcagcaacttctttgtgacgtttgcattcatctcacagtgttgaacatacctttccatagagtacttttgaaacactgtttttgtagaatctgcaagtggatatttggactgctttgaggccttcatcggaaacgggaatatcttcacataaacactagagagaagcattctcagaaacttctttgtcatctgtccattcaactcacagagttgaaccttcctttttatggagcagttttgaaacactccttttggagaatctgcaagtggatatttggagcgctttgaggcctatggtagaaaaagaaatatctgcctctaaaaaccagacagaagcattccgagaaacttctttgtgatgtttgcattcaactagcagagttgaaccttccttttgatagggcagtttgggaacactctttttgtagaatctgcatgtggatatctggagcggtttgaggcctacggtcaaaaaggaaatatcttcctgagaaaaatagacgaaagcattctcagaaactgctttgtgatatgtgcattcgactcaccgagttgaaactttttttggatagagcagttttgaaacactctttagaatctgaaagtggatatttggagctccttgagggctatggcggaaaagaaaatatattcacattaaactagacagcagcattctcagaaacttctttaggatgtttgcagtaaactcacagagttgaacctacctttccatagagcagttttgaaacactctgtttgtgggatatgcaagtggatatttggacagctttgagaactttgctggaaatgggaatatcttcacatataaactagacagaagcattctcagaaacttcttcgtgatgtgtgcattctactcccgaatttgaatcttccttttcatgaagcagttttgaaacactctgtttgtgcaatccacaattggataattggaacgctttgatgcccatggtagaaaaggaaatatcctcatataaaaactagacagaaggattcacagaaaatgctttgtgatgtgtgcattcaaatcacggagttgaatctttcttttgttagagcagtattgaaacactgtttctgtggaatctgccagcggacacttggagcgctttgagggctacggtggagaaggaaatatcttcacataaaaactagaaagaagcattctcagaaacatgtatgtgaagcgtgaattcaactcacagtgttgaaccttccttttgatagaacagttttgaaacactcttttgaacaattgcaggtgaatctttggagcgctttgaagccagtgttggaaatgggaatatcttcacacacaaactagccagaagcattctcagaaacttctttgtgatgtgtgcgttgaacccagagagatgaacctttcctttgaaagagcagttttgaaacgtgtttttgtaagatctgcaagcggatggttggcttcgctttgtgtcctttggtggaaacgggaatatcttctaataaaaactagacagaaaatattctcagaatcttctttgtgatgtgggcattcaactaacacagttgaacatttcttttcacagagcagttttgaaacactcttttggtagaatctgccagtggatatttggagcgcttggagggctattgtgccaatggaaatatctgcccctgaaaactagacagaagcattctcagaaactacttcgtgatgtctgcattcaacacacagagttgaacatacctcttcacagagcagttttgaaaacctctttctgtagaatctgcaagtggatattcggaccactttgaggccttcataggaaacagtaatatcttcacataaaaactagatagaagcattgtcagaaagttctttgtgatgtgtgaattcaactcacagagttgaaccttcctttaatagagcagttttgaaacactcattttctagaatctgcaagtagatatttggagcgctttgaggccttcgttggaaaccggaatatcttcacaggaaatgtagatagaggcattctcagaaactttttcgtgatatgtggattcaactcacagcgttgaacctttcttttgatagagcagttttgtaaaactcttttatcgaatctgcaagtagacatttggagtgctttcagggctgtggtgcaaaaggaaatgtcttcccatagaaactagactgaagccttctcagcaacttcattgtgacgtttgcattcatctcacagtgttgaacatacctttccatagagtagttttgaagcactatttttgtagaatctgcaagtggatatttggactgctttgaggccttcatcggaaacgggaatatcttcacataaacactagacagaagcattctcagaaacttctttgtggtctgtccattcaactcacagagttgaaccttcctttttatggagcagttttgaaacactgtttttggaggatctgcaagtggatatttggagcgctttgaggcctatggtagaaaaagaaatatctgcctatgacaactagacagaagcattccgagaaacttctttgtgatgtttgcattcaactagcagagttgaaccttccttttgatggggcagtttggaaacactctttttgtagaatctgcatgtggatatctggagcggtttgaggcctacggtcaaaaaggaaatatcttcctgggaaaaatagacgaaagcattctcagaagctgctttgtgatatgtgcattcaactcaccgagttgaaactttttttggatagagcagttttgaaacactctgtagaatctgaaagtggatatttggagctctttgagggctatggcggaaaagaaaatatattcacattaaactagacagcagcattctcagagacttctttaggatgtttgcagtaaactcacagagttgaacatacctttccgtaaagcagttttgaaaccttctgtttgtgggatctgcaagtggatatttggaccgctttgagacctttgctggaaatgggaatatcttcacatataaactagacagaaacattctcagaaacttcttcgtgacgtgtgcattgtactcccaaatttgaatcttgcttctcatggagcagttttgaaacactctgtttgtgcaatctacaattggagaattggaaggcttggatgcccgtggtagaaaaggaaatatcctcatataaaaactagacagaaggattcacagaaaatgctttgtgatgtgtgcattcaaatcacggggttgaatctttctttagtcagagcagttttgaaacactgtttctgtggaatctgccagcggacacttggagcgctttcagggctatggtggagaaggaaatatcttcccataaaaactagaaagaagcattctcagaaacatttatgtgaagcgtgcattcaactcacagagttgaaccttccttttgatagaagagttttgaaacacccttttgaacaattgcaggtgaatctttggagcgctttgaagcctttgttggaaatgggaatatcttcacacacaaactagccagaagcattctcagaaacttctttgtgatgtgtgcgttgaacccagagagatgaacctttcctttgatagagcagttttgaaacgtgtttttgtaagatctgcaagcggataattggcttcgctttgtgtccttcggtggaaacgggaatatcttctaataaaaactagacagagatattctcagaaacttctttgtgatgtgggcattcaactaacacagtcgaacatttcttttcacagagcagttttgaaacactcttttggtcgaatctgccagtggatatttggagcgctttgagggctattgtgccaatggaaatatctgcccctaaaaactagacagaagcattctcagaaactacttcgtgatgtctgcattcaacacacagagttgaacatacctcttcagagagcagttttgaaaacctctttctgtagaatctgcaagtggatattcggaccactttgaggccttcataggaaacagtaatatcttcacataaaaactagatagaagcattgtcagaaagttcgttgtgatgtgtgaatttaactcacagagttgaagcttcctttaatagagcagttttgaaacactctttttctagagtctgcaagtagatatttggagcgctttgaggccttcgttggaaaccggaatatcttcacataaaaagtagatagaggcattctcagaaacttttttgtgatatgtagattcaactcacagcgttgaacctttcttttgatagagcagttttgaaaaacgcttttatcgaatctgccagtagaccttttgagtgctttgagggctgtggtgcaaaaggaaatgtcttcccatagaaactagactgaaagcattctcagcaacttcttggtgacgtttgcattcatctcacagtgttgaacatacctttccatagagtagttttgaaacactgtttttgtagaatcggcaagtggatatttggactgctttgaggccttcatcggaaacgggaatatcttcacataaacactagagagaagcatcctcagaaacttatttgtcatctgtccattcaactcacagatttgaaccttcctttttctgcagcagttttgaaacactctttttggagaatctgcaagtggatatttggagcgctttgaggcctatggtagaaaaagaaatatctgcctctaaaaaccagacagaagcattctgagaaacttctttgtgatgtttgccttcaactaccagagttgaaccttccttttgatagggcagtttggaaacactctttttgtagaatctgcatgtggatatctggagcgatttgaggcctacggtccaaaaggaaatgtcttcctgggaaagatagacgaaagcattctcagaaagtgctttgtgatatgcgcattcgactcaccgagttgaaacttttttttgatacagcagttttgaaacactctgtagaatctgaaagtggatatttggagctctttgagggctatggcggaaaagaaaatatattcacattaaagtagacagcagcattctcagaaacttctttaggatgtttgcagtaaactcgcagagttgaacatacctttccgtagagcagttttgaaacactctgtttgtgggatccgcaagtggatatttggaccgctttgagacctttgctggaaatgggaatatcttcacgtataaactagacagaagcattctcagaaacttcttcgtgatgtgtgcattctactcccgaatttgaatcttccttttcatgaagcagttttgaaacactctgtttgtgcaatccacaattggataattggaacgctttgatgtcccatggtagaaaaggaaatatcctcatataaaaactagacagaaagattcacagaaaatgctttgtgatgtgtgcattcaaatcacggagttgaatctttcttttgtcagagcagttttgaaacactgtttctgtggaatctgccagcggacacttggagcactttgagggctatggtggagaaggaaatatcttcccataaaaactagaaagaagcattctcagaaccatttatgtgaagcatgcattcaactcatagagttgaactttccttttgatagaacagttttgaaacactcttttgaacaattgcaggtgaatatttggagggctttgaagcctttgttggaaacgggaatatcttcacacacgaactagccagaagcattctcagaaacttctttgtgatgtgtgcgttgaacccagagagatgaacctttcctttgatagagcagttttgaaacgtgtttttgtaagatctgcaagcggataattggcttcgctttgtgtcctttggtggaaacgggaatatcttctaataaaaactagacagagcgatattctcagaaacttctttgtgatgtgggcattcaactaatgcagttgaacatttcttttcacagagcagttttgaaacactcttttggtcgaatctgccagtggatatttggagcgctttgagggctattgtgccaatggaaatatctgcccctaaaaactagacagaagaattctcagaaactgcttcgggatgtttgcattcaactcacagagttgaacatacctctgcatagagcagttttgaaaacctctttttgtagaatctgcaagtggatattcggaccactttgaggccttcatgggaaacagtaatatcttcacataaaaactagatagaagcattgtcagaaagttctttgtgatgtgtgaattcaactcacagagttgaaccttcctttaatagagcagttttgaaacactctttttctagaatctgccagtagatatttggagcgctttgaggccttcgttggaaaccggaatatcttcacataaaaagtagatagaggcattctcagaaacttttttgtgatatgtagattcagctcacagcgttgaacctttcttttgatagagcagttttgaaaaactcttttatcgaatctgccagtagacatttggagtgctttgagggctgtggtgcaaaaggaaatgtcttcccatggaaactagactgaatcattctcagcaacttcttggtgacgtttgcattcatctcacagtgttgaacatacctttgcatagagtagttttgaaacactatttttgtagaatctgcaagtggacatttggactgctttgaggccttcatcggaaacgggaatatcttcacataaacactagacagaagcattctcagaaacttctttgtggtctgtccattcaactcacagagttgaaccttcctttatatggagcagttttgaaaccctgtttttggagaatctgcaagtggatatttggagcgctttgaggcctatggtagaaaaagaaatatctgcctatcacagctagacagaagcattctgagaaagttctttgtgatgtttgcattcaactaccagggttgaaccttccttttgatagggcagtttggaaacactctttttgtagaatctgcatgtggatatctggagcgatttaaggcctaaggtccaaaaggaaatatcttcctgggaaaaatagacgaaagcattctcagaaagggctttgtgatatgcgcattcgactcaccgagttgaaacttttttttgatagagcagttttgaaacactctgtagaacctgaaagtggatatttggagctctttcagggctatggcggaaaagaaaatatattcacattaaagtagacagcagcattctcagaaacttctttaggatgtttgcagtaaactcacagagttgaacctacctttccgtagagcagttttgaaacactctgtttgtgggatccgcaagtggatatttgggaccgctttgagacctttgctggaaatgggaatatcttcacatataaactagacagaagcattctcagaaacttcttcgtgatgtgtgcattgtactcccaaatttgaatcttccttcttatggagcagttttgaaacactctgtttgtgcaatctacaattggagaattggaacgcttggatgcccgtggtagaaaaggaaatatcctcatataaaaactagacagaaggattcacagtaaaatgctttgtgatgtgtgcattcaaatcacggagttgaatctttcttttgtcagagcagttttgaaacactgtttctgtggaatctgccagcggacacttggagcgctttgagggctatggtggagaaggaaatatcttcccataaaaactagaaagaagcattctcagaaacatttatgtgaagcgtgcattcagctcacagagttgaaccttccttttgatagaacagttttgaaacactcttttgaacaattgcaggtgaatctttgagcgctttgaagcctttgttggaaatgggaatatcttcacacacaaactagccagaagcattctcagagacttctttgtgatgtgtgcgttgaacccagagagatgaacctttcctttgatagagcagttttgaaacgtgtttttgtaagatctgcaagcggatagttggcttcgctttgtgtcctttggtggaaacgggaatatcttctaataaaaactagacagaaatattctcacaatcgtctttgtgatgtgggcattcaactaacacagttgaacatttcttctcacagagcagttttgaaacactcttttgctagaatctgccagtggatacttggagcactttgagggctattgtgccaatggagatatcttcccctaaaaactagacagaagcattctcagaaactgcttcgggatgtttgcattcaactcacagagttgaacatacctctgcatagagcagttttgaaaacctctttttgtagaatctgcaagtggatattcggaccactttgaggccttcatgggaaacagtaatatcttcacataaaaactagatagaagcattgtcagaaagttctttgtgatgtgtgaattcaactcacagagttgaaccttccttcaatagagcagttgtgaaacactctttttctagaatctgcaagtagatacttggagcgctttgaggccttcgttggaaaccggaatatcttcacaggaaaagtagatagaggcattctcagaaacttttttgtgatatgtagattcaactcacagcgttgaacctttcttttgatagagtagttttgaaaaactcttttatcgaatctgcaagtagacatttggagtgctttgagggctgtggtgcaaaaggaaatgtcttcccatagaaactagactgaaatcattctcagcaacttcttggtgacgtttgcattcatctcacagtgttgaacatacctttgcatagagtagtttcgaaacactatttttgtagaatctgcaagtggacatttggactgctttgaggccttcatcggaaacgggaatatcttcacataaacactagacagaagcattctcagaaacttcttgtcatctgtccattcaactcacaaagttgaaccttcctttttatggagcagttttgaaacactccttttggagaatctgcaagtggatatttggagcgctttgaggcctatggtagaaaaagaaatatctgcctctaaaaaccagacagaagcattctgagaaacttctttgtgatgtttgcattcaactaccagagttgaaccttccttttgatagggcagtttggaaacactctttttgtagaatctgcatgtggatatctggagcgatttgaggcctgcggtcaaaaaggaaatatcttcctgggaaaaatagacgaaagcattctcagaaactgctttgtgatatgtgcattcgactcaccgagttgaaacttttttttggtagagcagttttgaaacactctgtagaatctgaaagtggatatttggagctctttgagggctatggcggaaaagaaaatatattcacattaaagtagacagcagcattcccagaaacttctttaggatgtttgctgtaaactcacagagttgaacatacctttccgtagagcagctttgaaacactctgtgtgtgggatccgcaagtggatatttggaccgctttgagacctttgctggaaacgggaatatcttcacatataaactggacagaagcattctcagaaacttcttcgtgatgtgtgcattctactcccaaatttgaatcttccttttcatgaagcagttttgaaacactctatttgtgcattctacaattggatgattggaacgctttgatgcccatggtagaaaaggaaatatcctcatataaaaactagacagaaagattcacagaaaatgctttgtgatgtgtgcattcaaatcacggagttgaatctttcttttgttagagcagttttgaaacactgtttctgtggaatctgccagcggacacttggagcgctttgagggctatggtggagaaggaaatatcttcacataaaaactagaaagaagcattctcagaaccatttatgtgaagcgtgcattcaactcacagagttgaaccttccttttgatagaacagttttgaaacactcttttgaacaattgcaggtgaatatttggagggctttgaagccttttttggaaatgggaatatcttcacacacaaactagccagaagcattctcagaaacttctttgtgatgtgtgcgttgaacccagaagagatgaacctttcctttgatagagcagttttgaaacgtgtttttgtaagatctgcaagcggatagttggcttcgctttgtgtcctttggtggaaacgggaatatcttctaataaaaactagacagagatattctcagaaatttctttgtgatgtgggcattcaactaacacagtcgaacatttcttttcacagagcagttttgaaacactcttttggtcgaatctgccagtggatatttggagcgctttgagggctattgtgccaatggaaatatctgcccctaaaaactagacagaagcattctcagaaactgctctgtgatgtttgcattcaactcacagagttgaacatacctcttcatagagcacttttggaaacctctttttgtagaatctgcaagtggatattcggaccactttgaggccttcataggaaacggtaatatcttcacataaaaactagatagaagcattgtcagaaagttctttgtgatgtgtggattcaactcacagagttgaaccttcctttaatagagcagttttgaaacactctttttgtagaatctgcaagtggatatttggagcgctttgaggccttcgttggaaaccggaatatcttcacaggaaaagtagatagaggcattctcagaaactctttgtgatatgtagattcaactcacagcgttgaacctttctttggatggagtagttttgaaaaactcttttatcgaatctgcaggtagacatttggggtgctttgagggctgtggtgcaaaaggaaatgtcttcccatagaaactagactgaagcattctcagcaacttcttggtgacgtttgcattcatctcacagtgttgaacatacctttccatagagtggttttgaaacactgtttttgtagaatcggctagtggatatttggacagctttcaggccttcatcggtaacgggaatatcttcacataaacactagagagaagaattctcagaaacttctttgtgatctgtccattcaactcacagagttgaaccttcctttttatggagcagttttgaaacactgtttgtggagaatctgcaggtggatatttggagcgccttgaggccaatggtagaaaaagaaatatctgcctctaaatactagactgaagcattctgagaaacttctttgtgatgtttgcattcaactaccagagttgaaccttccttttgatagggcagtttggaaacactctttttgtagaatctgcatgtggatatctggagcgatttgaggcctacggtccaaaaggaaatatcttcctgggaaaaatagacgaaagcatcctcagaaactgctttgtgatatgtgcattcgactcaccgagttgaaactttttttggatagagcagttttgaaacactctgtagaatctgaaagtggatatttggagctctttgagggctatggcggaaaagaaaatatattcacattaaacaagacagcagcattcccagaaacttctttaggatgtttgcagtaaactcacagagttgaacatacctttccgtagagcagttttgaaacactctgtttgtgggatccgcaagtggatatttggaccgctgtgagacctttgctggaaacgggaatatcttcacatataaactagacagaagcattctcagaaacttcttcgtgatgtgtgcattgtactcccaaatttgaatcttccttctcatggagcagttttgaaacactctgtttgtgcaatctacaattggataattggaacgcttggatgcccatggtagaaaaggaaatatcctcatataaaaactagatcagaaggactcacagaaaatgctttgtgatatgtgcattcagatcacggagttgaatctttcttttgttagagcagttttgaaacactgtttctgtggaatctgccagcggacacttggagcgctttgagggctatggtggagaaggaaatatcttcacataaaaactagaaagaagcattctcagaaccatttatgtgaagcgtgcgttcaactcacagagttgaaccttccttttgatagaacagttttgaaacactcttttgaacaattgcaggtgaatatttggagggctttgaagcctttgttggaaatgggaatatcttcacacacaaactagccagaaagcattctcagaaacttctttgtgatgtgtgcgttgaacccagagagatgaacctttcctttgatagagcagttttgaaacgtgtttttgtaagatctgcaagcggataattggcttcgctttgtgtcctttggtggaaacgggaatatcttctaataaaaactagacagaaatattctcagaatcttctttgtgatgtgggcattcagctaacacagttgaacgtttcttttcacagagcagttttgaaacactcttttggtagaatctgccagtggatatttggagcgctttgagggctattgtgccaatggaaatatctgcccctaaaaactagacagaagcattctcagaaattgctttgtgatgttggcattcaactcacagagttgaacatacctcttcatagagcagttttgaaaacctctttttgtagaatctgcaagtggatattcggaccactttgaggccttcataggaaacagtaatatcttcacataaaaactagatagaagcattgtcagaaagttctttgtgatgtgtgaattcaactcacagagttgaaccttcctttaatagagcagttttgaaacactctttttctagaatctgcaagtagatatttggagccctttgaggccttctttggaaactggaatatcttcacataaaaagtatatagaggcatgctcagaaacttttttgtcatatgtagattcaactcacagcgttgaacctttcttttgatagagcagttttgaaaaactcttttatcgattctgcaagtagacatttggagtgctttgagggctctggtgcaaaaggaaatgtcttcccatagaaactagactgaagcattctcagcaacttctttgtgacgtttgcattcatctcacagtgttgaacatacctttccatagagtagttttgaaacactgtttttgtagaatcggccagtggatatttggactgctttgaggccttcatcgggaacgggaatatcttcacataaacactagagagaagcattctcagaaacttctttgtcatctgtccattcaactcacagagttgaaccttcctttttatggagcagttttgaaacactccttttggagaatctgcaggtggatatttggagcgctttgaggcctatggtagaaaaagaaatatctgcctctaaaaaccagacagaagcattctgagaaaagttctttgtgatgtctgcattcaactagcagagttgaaccttccttttgatagggcagtttggaaacactctttttgtagaatctgcatgtggatatctggagcggtttgaggcctacggtcaaaaaggaaatatcttcctgggaaaaatagacgaaagcatcctcagaaactgctttgtgatatgtgcattcgactcactgagttgaaactttttttggatagagcagttttgaaacactctgtagaatctgaaagtggatatttggagctctttgagggctatggcggaaaagaaaatatattcacattaaactagacagcagcattctcagaaacttctttaggatgtttgcagtaaactcacagagttgaaacctacctttccgtagagcagttttgaaacactctgtttgtgggatccgcaagtagatatttggaccgctttgagacctttgctggaaatgggaatatcttcacatataaactagacagaagcattctcagaaacttcttcgtgatgtgtgcattctactcccaaatttgaatcttccttttcatgaagcagttttgaaacactctatttgtccaatctacaatgggataattggaacgctttgatgcccatggtagaaaaggaaatatcctcatataaaaactagacagaaggattcacagaaaatgctttgtgatgtgtgcattcaaatcacggagttgaatctttcttttgttagagcagttttgaaacactgtttctgtggaatctgccagcggacactaggagcgctttgagggctatggtggagaaggaaatatcttcacataaaaactagaaagaagcattctcagaaccatttatgttaagcgtgcattcaactcacagagttgaaccttccttttgatagaacagttttgaaacactcttttgaacaattgcaggtgaatatttggagggctttgaagcctttgttggaaatgggaatatcttcacacacaaactagccagaagcattctcagaaacttctttgtgatgtgtgcgttgaacccagggagatgaacctttcctttgatagagcagttttgaaacgtgtttttgtaagatctgcaagcggatagttggcttcggtttgtgtcctttggtggaaacgggaatatcttctaataaaaactagacagaaatattctcagaatcttctttgtgatgtgggcattcagctaacacagttgaacgtttcttttcacagagcagttttgaaacactcttttggtagaatctgccagtggatatttggagcgctttgagggctattgtgccaacggaaatatctgcccctaaaaactagacagaagcattctcagaaactgctttgggatgtttgcattcaactcacagagttgaacatacctcttcatagagcagttttgaaaacctctttttgtagaatctgcaagtggatattcggaccactttgaggccttcataggaaacagtaatatcatcacataaaaactagatagaagcattgtcagaaagttctttttgatgtgtgaattcaactcacagagttgaaccttccttcaatagagcagttgtgaaacactctttttctagaatctgcaagtagatacttggagcgctttgaggccttcgttggaaaccggaatatcttcacaggaaaagtagatagaggcatgctcagaaacttttttgtcatatgtagattcaactcacagcgttgaacctttcttttgatagagcagttttgaaaaactcttttatcgaatctgcaagtagacatttggagtgctttgacggctctggtgcaaaaggaaatgtcttcccatagaacctagactgaatcattctcagcaacttcttggtgacgtttgcattcatctcacagtgttgaacatacctttgcatagagtagtttcgaaacactatttttgtagaatctgcaagtggacattcggactgctttgaggccttcatcggaaacgggaatatcttcacataaacactagacagaagcattctcagaaacttctttgtggtctgtccattcaactcacagagttgaaccttcctttttatggagcagttttgaaacactgttttcggaggatctgcaagtggatatttggagcgctttgaggcctatggtagtaaaagaaatatctgcctatgacaactagacagaagcattccgagaaaagttctttgtgatgtttgcattcaactagcagagttgaaccttccttttgatagggcagtttggaaacactctttttgtagaatctgcatgtggatatctggagcggtttgaggcctacggtcaaaaaggaaatatcttcctgggaaaaatagacgaaagcattctcagcaaagggctttgtgatatgcgcattcgactcaccgagttgaaacttttttttgatagagcagttttgaaacactctgtagaacctgaaagtggatatttggagctctttcagggctatgacggaaaagaaaatatattcacattaaagtagacagcagcattctcagaaacttctttaggatgtttgcagtaaactcacagagttgaacctacctttccgtagagcagttttgaaacactctgtttgtgggatccgcaagtggatatttggaccgctttgagacctttgctggaaatgggaatatctgcacatttaaactagacagaagcattctcagaaacttcttcgtgatgtgtgcattctcctcccgaatttgaatcttcctttttatgaagcagttttgaaacactctgtttgtgcaatccacaattggataattggaacgctttgatgcccatggtagaaaaggaaatatcctcatataaaaactagacagaaggattcacagaaaatgctttgtgatgtgtgcattcaaatcacggagttgaatctttcttttgtcagagcagttttgaaacactgtttctgtggaatctgccagcggactcttggagctctttgagggctatggtggagaaggaaatatcttcccataaaaactagaaagaagcattctcagaaacatttatgtgaagcgtgcattcaactcacagagttgaaccttccttttgatacaacagttttgaaacactcttttgaacaattgcaggtgaatctttggagcgctttgaagcctttgttggaaatgggaatatcttcacacacaaactagccagaagtattcccagaaacttctttgtgatgtgtgcgttgaacccagagagatgaacctttcctttgatagagcagttttgaaacgtgtttttgtaagatctgcaagcggataattggctttgctttgtgtcccttggtggaaacgggaatatcttctaataaaaactagacagagatattctcagaaacttctttgtgatgtgggcattcaactaacacagtcgaacatttcttttcatgaagcagttttgaaacactcttttggacgaatctgccagtggatatttggagcgctttgagggctattgtgccaatggaaatatctgcccctaaaaactagacagaagcattctcagaaactgctttgggatgtctgcattcaactcacagagttgaacatacctcttcatagagcagtttcgaaaacctctttttgtagaatctgcaagtggatattcggaacactttgaggccttcataggaaacagtaatatcatcacataaaaactagatagaagcattgtcagaaagttctttgtgatgtgtgaattcaacacacagagttgaaccttcctttaatagagcagttttgaaacactctttttctagaatctgccagtagatatttggagcgctttgaggccttcgttggaaaccggaatatcttcacataaaacgtagatagaggcattctcagaaactttttcgtgatatgtggattcaactcacagcgttgaacctttcttttgatagagcagttttgtaaaactcttttatcgaatctgcaagtagacatttggagtgcgttgagggctgtggtgcaaaaggaaatgtcttcccatagaaagtagactgaagcattctcagcaacttcttggtgacgtttgcattcatctcacagtgttgaacatacctttacatagagtggttttgaaacactgtttttgtagaatcggcaagtggatatttggactgctttgaggccttcatcggaaacgggaatatcttcacttaaacactagagagagaagcattctcagaaacttctttgtggtctgtccattcaactcacagagttgaaccttcctttttatggagcagttttgaaacactgtttttggaggatctgcaagtggatatttggagcgctttgaggcctatggtagaaaaagaaatatctgcctatgacaactagacagaagcattctgagaaacttctttgtgatgtttgcattcaactaccagagttgaaccttccttttgatagggcagtttggaaacactctttttgtagaatctgcatgtggatatctggagcgatttgaggcctatggtcaaaaaggaaataacttcctgggaaaaatagacgaaagcattctcagaaactgctttgtgatatgtgcattcgactcaccgagttgaaacttttttttgatagagcagttttgaaacactctgtagaatctgaaagtggatatttggagctctttgagggctatggcagaaaagaaaatatattcacattaaagtagacagcagcatcctcagaaacttctttatgatgtttgcattaaactcacagagttgaacatacctttccatagagcagttttgaaacactctttttggggaatccgcaagtggatatttggaccgctttgagacctttgctggaaatgggaatatcttcacatataaactagacagaagcattctcagaaacttcttggtgatgtgtgcattgtactcccaaatttgaatcttccttctcatggagcagttttgaaacactctgtttgtgcaatctacaattggagaattggaacgcttggatgcccgtggtagaaaaggaaatatcctcatataaaaactagacagaaggattcacagaaaatgctttgtgatgtgtgcattcaaatcacggagttgaatctttcttttgtcagagcagttttgaaacactgtttctgtggaatctgccagcggacacttggagcgctttgagggctacggtggagaaggaaatatcttcacataaaaactagaaagaagcattctcagaaacatttctgtgaagcatgcattcaactcacagagttgaaccttccttttgttagaacagttttgaaaaactcttttgaacaattgcaggtgaatatttggagcgctttgaagcctttgctggaaatgggaatatcttcacgcacaaagtagccagaagcattctcagaaacttctttgtgatgtgtgcgttgaacccagagagatgaaccttttcctttgatagagcagttttgaaacgtgtttttgtaagatcggcaagtggataattggcttcgctttgtgtcctttgttggaaacgggaatatcttctaataaaaactagacagaaatattctcacaatcatctttgtgatgtgggcattcaactaacacagttgaacatttcttttcacagagccgttttgaaacactcttttgctagaatctgccagtggatacttggagcgctttgagggctattgtgccaatggagatatcttcccctaaaaactagacagaagcattctcagaaactacattgtgatgtttgcattcgactcacagagttgaacatacctcttcatagagcagttttgaaaaccttttttgtagaacctgaaagtggatattcggtcctctttgaagccttcataggaaacagtaatatcttcacataaaacctagctagaagcattgtcagaaagttctttgtgatgtgtgaattcaactcacagagttgaaccttcctttaatagagaagttttgaaacactctttttctagaatctgcaagtagatatttggagcgcttggaggccttcgttggaaaccggaatatcttcacaggaaatgtagatagaggcatgctcagaaacttttttgtcatatgtagattcaactcacagcgttgaacctttcttttgatagagcagttttgaaaaactcttttatcgaatctgcaagtagacatttggagtgctttgagggctctggtgcaaaaggaaatgtcttcccatagaaagtagactgaagcattctcagcaacttcttggtgacgtttgcattcatctcacagtgttgaacatacctttccctagagtggttttgaaacactgtttttgtagaatcggcaagtggatatttggactgctttgaggccttcatcggaaaagggaatatcttcacataaacactagagagaagcattctcagaaacttctttgtggtctgtccattcaactcacagagttgaaccttcctttttatggagcagttttgaaacactgttttcggagaatctgcaagtggatatttggagcgctttgaggcctatggtagaaaaagaaatatctgcctatgacaactagacagaagcattctgagaaacttctttgtgatgtttgcattgaactaccagaggtgaaccttccttttgatagggcagtttggaaacactctttttgtagaatctgcatgtggatatctggagcgatttgaggcctacggtccaaaaggaaatatcttcctgggaaaaatagacgaaagcattctcagaaactgctttgtgatatgtgcattcgactcaccgagttgaaactttttttggatagagcagttttgaaacactctgtagaatctgaaagtggatatttggagctctttgagggctatggcggaaaagaaaagatattcacattaaactagacagcagcattcccagtaaacttctttaggatgtttgcagtaaactcacagagttgaacatacctttccgtagagcagttttgaaacactctgtttgtgggatccgcaagtggatatttggaccgctttgagacctttgctggaaacgggaatatcttcacatataaactggacagaagcattctcagaaacttcctcgtgatgtgtgcattctactcccgaatttgaatcttccttttcatgaagcagttttgaaacactctgtttgtgcgatccacaattggataattggaacgctttgatgcccatggtagaaaaggaaatatcctcatatgaaaactagacagaaggattcacagaaaatgctttgtgatgtgtgcattcaaatcacggagttgaatctttcttttgttagagcagttttgaaacactctttctgtggaatctgccagcggacacttggagcgctttgagggctatggtggagaaggaaatatcttcacataaaaactagaaagaagcattctcagaaacatttatgtgaagcgtgcattcaactcacagcagttgaaccttccttttgatacaacagttttgaaacactcttttgaacaattgcaggtgaatctttggagcgctttgaagcctttgttggaaatgggaatatcttcacacacaaactagccagaagcattctcagaaacttctttgtgatgtgtgtgttgaacccagagagatgaacctttccttcgatagagcagttttgaaacgtgtttttgtaagatcggcaagcggataattggcttcgctttgtgtcctttggtggaaacgggaatatcttctaataaaaactagacagaaatattctcagaatcttctttgtgatgtgggcattcaacaaacacagttgaacgtttcttttcacagagcagttttgaaacactcttttggtagaatctgccagtggatatttggagcgctttgagggctattgtgccaatggaaataacttcccctaaaaactagacagaagcattctcagaaactgctttgtgatgtttgcattcaactcacagagttgaacctacctcttcatagagcagtttggaaaacctcttcttgtagaatctgcaagtggatattcggaccactttgaggctttcataggaaacagtaatatcttcacataaaaactagatagaagcattgtcagaaagttctttgtgatgtgtgaattcaactcacagagttgaaccttcctttaatagagcagttttgaaacactcttcttctagaatctgcaagtagatatttggagcgttttgaggccttcgttggaaaccggaatatcttcacagaaaaagtagatagaggcattctcagaaactttttcgtgatatgtggattcaactcaaagcgttgaacctttcttttgatagagcagttttgtaaaactcttttatcgaatctgcaagtagacatttggagtgctttgggggctgtggtgcaaaaggaaatgtcttcccatagaaactagactgaagcattctcagcaacttctttgtgacgtttgcattcatctcacagtgttgaacatacctttccatagagtagttttgaaacactgtttttgtagaatcgggaagtggatatttggactgctttgaggccttcatcggaaacgggaatatcttcacataaacactagagagaagcatcctcagaaacttctttgtcatctgtccattcaactcacagagttgaaccttcctttttctggagcagttttgaaacactctttttggagaatctgcaagtggatatttggagcgctttgaggcctatggtagaaaaataaatatctgcctctaaaaaccagacagaagcattccgagaaacttctttgtgatgtttgcattcaactagcagagttgaacctttcttttgatagggcagtttggaaacactctttttgtagaatctgcatgtggatatctggagcggtttgaggcctacggtcaaaaaggaaatatcttcctgggaaaaatagacgaaagcattctcagaaactgctttgtgatatgggcattcgactcaccgagttgaatcttttttttgatagagcagttttgaaacactctgtagaatctgaaagtggatatttggagctctttgagggctatggcggaaaagaaaatatattcacattaaactagagaggagcattctcagaaacttctttaggatgtttgcagtaaactcacagagttgaacatacctttccgtagagcagttttgaaacactctgtttgtgggatccgcaagtggatatttggaccgctttgagaactttgctggaaatggcaatatcttcacgtattaactagacagaagcattctcagaaacttcttcgtgatgtgtgcattctactcccgaatttgaatcttccttttcatgaagcagttttgaaacactctgtttgtgcaatccacaattggataattggaacgctttgatgcccatggtagaaaaggaaatatcctcatataaaaaccagacggaaggattcacagaaaatgctttgtgatgtgtgcattcaaatcgcggagttgaatctttcttttgttagagcagttttgaaacactgtttctgtggaatctgccagcggacacttggagcgctttgagggctatggtggagaaggaaatatcttcacataaaaactagaaagaagcattctcagaaacatttatgtgaagcgtgcattcaactcacagagttgaaccttccttttgatacaacagttttgaaacattcttttgaacaattgcaggtgaatctttggagcgctttgaagcctttgttggaaatgggaatatcttcacacacaaactagccagaagcattctcagaaacttctttgtgatgtgtgcgttgaacccagagagatgaacctttccttcgatagagcagttttgaaacgtgtttttgtaaggtcggcaagcggataaatggcttcgctttgtgtcctttggtggaaacgggaatatcttctaataaaaactagacagaaatattctcagaatctcctttgtgatgtgggcattcaactaacacagttgaacatttcttttcacagggcagttttgagacactcttttggtagaatctgccagtggatatttggagcgctttgagggctgttgtgccaatggaaatatctgcccctaaaatctagacagaagcattctctgaaactactttgtgatgtttgcattcaactcacagagttgaacatacctcttcatagagcagttttgaaaacctctttttgaagaatctgcaagtggatattcggaccactttgaggccttcataggaaacagtaatatcttcacataaaaactagatagaagcattgtcagaaagttctttgtgatgtgtgaattcaactcacagagttgaaacttcctttaatagagcagttttgaaacactctttttctagaatctgcaagtagatatttggagcgctttgaggccttctttggaaaccggaatatcttcacataaaaagtagatagaggtattctcagaaacttttttgtgatatgtagattcaactcacagcgttgaacctttcttttgatagagcagttttgaaaaactcttttatcgaatctgcatgtggacatttggagtgctttgagggctgtggtgcaaaaggaaatgtcttcacatagaaactagactgaagcattctcagcaacttctttgtgacgtttgcattcatctcacagtgttgaacatacctttccatagagtagttttgaaacactatttttgtagaatctgcaagtggatatttggactgctttgaggccttcatcggaaacgggaatatcttcacataaacactagacagaagcattctcagaaacttctttgtgatctgtccattcaactcacagagttgaaccttcctttttatggagcagttttgaaacactgtttttggagaatctgcaagtagatatttggagcgctttgtggcctatggtagaaaaagaaatatctgcctataacagctagacagaagcattccgagaaacttctctgtgatgtttgccttcaactagcagagttgaaccttccttttgatagggcagtttggaaacactctttttgtagaatctgcatgtggatatctggagcggtttgaggcctacggtcaaaaaggaaatatcttcctgggaaaaatagacgaaagcattctcagaaactgctttgtgatatgtgcattcgactgaccgagttgaaacttttttttgatagagcagttttgaaacactctgtagaatctgaaagtggatatttggagctctttgagggctatggcggaaaagaaactatattcacattaaagtagacagcagcattctcagcaaacatctttaggatgtttgcagtaaactcacagagttgaacatacctttccgtaaagcagttttgaaaccctctgtttgtgggatctgcaagtggatatttggaccgctttgagacctttgctggaaatgggaatatcttcacatataaactagacagaagcattctcagaaacttcttcgtgatgtgtgcattgtactcccaaatttgaatcttccttctcatggagcagttttgaaacactctgtttgtgcaatctacaattggagaattggaacgcttggatgcccgtggtagaaaaggaaatatcctcatacaaaaactagacagaaggattcacagaaaatgctttgtgatgtgtgcattcaaatcacggagttgaatctttcttttgttagagcagttttgaaacactgtttctgtggaatctgccaggggacacttggagcgctttgagggctatggtggagaaggaaatatcttcacataaaaactagaaagaaatattctcagaaatcttctttgtgatgtgggcattcaactaacacagttgaacatttcttttcacagaacagttttgaaacactcttttgaacaattgcaggtgaatctttggaacgctttgaagcctttgttggaaataggaatatattcacacacaaactagccagaagcattctcagaaacttctttgtgatgtgtgcgttgaacccagagagatgaacctttcctttgatagagcagttttgaaacgtgtttttgtaagatctgcaagcagataattggcttcgctttgtgtcctttggtggaaacgggaatatcttctaataaaaactagacagaaatattctcagaatctcctttgtgatgtgggcattcaactaacacagttgaacatttcttttcacagagcagttttgaaacactcttttggtagaatctgccagtggatatttggagcgcttggagggctattgtgccaatggaaatatctgcccctaaaaactagacagaagcattctcagaaactacttcgtgatgtttgcattcaacacacagagttgaacatacctcttcacagagcagttttgaaaacctctttctgtagaatctgcaagtggatattcggaccactttgaggccttcataggaaacagtaatatcttcacataaaaactagacagaagcattgtcagaaagttctttgtgatgtgtgaattcaactcacagagttgaaccttcctttaatagagcagttttgaaacactctttttctagaatctgcaagtagatatttggagcgctttgaggccttcgttggaaaccggaatatcttcacataaaaagtagatagaggcatgctcagcaaacttttttgtcatatgtagattcaactcacagcgttgaacctttcttttgatagagcagttttgaaaaactcttttatcgaatctgcaagtagacatttggagtgctttgagggctctggtgcaaaaggaaatgtcttcccatagaaactagactgaagcattctcagcaacttcttggtgacgtttgcattcatctcacagtgttgaacatacctttagatagagtggttttgaaacactgtttttgtagaatcggcaagtggatatttggactgctttgaggccttcatcggaaacgggaatatcttcacataaacactagagagaagcattctcagaaacttctttgtcatctgtccattcaactcacagagttgaaccttcctttttatggagcagttttgaatcactccttttggagtatctgcaggtggatatttggagcgctttgaggcctatggtagaaaaagaaatatctgcctctaaaaaccagacagaagcattctgaggaaacttctttgtgatgtttgcattcaactaccagagttgaaccttccttttgatagggcagtttggaaacagtctttttgtagaatctgcatgtggatatctggagcgatttgaggcctacggtccaaaaggaaatatcttcctgggaaaaatagacgaaagcatcctcagaaactgctttgtgatatgtgcattcgactcaccgagttgaaactttttttggatagagcagttttgaaacactctgtagaatctgaaagtggatatttggagctctttgagggctatggcggaaaagaaaatatattcacattaaactagacagcagcattcccagaaacttctttaggatgtttgcagtaaactcacagagttgaacatacctttccgtagagcagttttgaaacactctgtttgtgggatccgcaagtgaatatttggacccctttgagacccttgctggaaacgggaatatcttcacatataaactagacagaagcattctcagaaacttctttgtgatgtgtgcattctacacccaaatttgaatcttccttttcatgaagcagttttgaaacactctatttgtgcaatctacaattggataattggaaatctttgatgcccatggtagaaaaggaaatatcctcatataaaaactagacagaaggattcacagaaaatgctttgtgatgtgtgcattcaaatcacggagttgaatctttcttttgttagagcagttttgaaacactgtttctgtggaatctgccagcggacacttggagcgctttgaaggctatggtggagaaggaaatatcttcacataaaaactagaaagaagcattctcagaaacatttatgtgaagcgcgcattcaactcacagagttgaaccttccttttgatacaacagttttgaaacactcttttgaacaattgcaggtgaatctttggagcgctttgaagcctttgttggaaatgggaatatcttcacactcaaactagccagaagcattcccagaaacttctttgtgatgtgtgcgttgaacccagagagatgaacctttcctttcatagagcagttttgaaacgtgtttttgtaagatcggcaagcggataagtggcttcgctttgtgtcctttggtggaaacgggaatatcttctaataaaaactagacagaaatattctcagaatcttctttgtgatgtgggcattcaactaacacagttgaacatttcttttcacagagcagttttgaaacactcttttggtagaatctgccagtggatatttggagcgctttgagggctattgtgccaatggaaatatctgcccctaaaaactagacagaagcattctcagaaactgcttcgtgatgtttgcattcaactcacagacttgaacatacctctgcatagagcagttttgaaaacctctttttgtagaatctgcaagtggatattcggaccactttgaggccttcataggaaacagtaatatcttcacataaaaactagatagaagcattgtcagaaagttctttgtgatgtgtgaattcaactcacagagttgaaccttcctttaatagagcagttttgaaacactctttttctagaatctgcaagtcgatatttggagcgctttgaggccttctttggaaaccggaatatcttcacataaaaagtagatagaggcattctcagaaacttttttgtgatatgtagattcaactcacagcgttgaacctttctttggatggagcagttttgaaaaacccttttatcgaatctgcaggtagacatttggggtgctttgagggctgtggtgcaaaaggtaatgtcttcccatagaaactagactgaagcattctcagcaacttctttgtgacgtttgcattcatctcacagtgttgaacatacctttccatagagtagttttgaaacactatttttgtagaatctgcaagtggatatttggactgctctgaggccttcatcggaaacgggaatatcttcacataaacactagacagaagcattctcagaaacttctttgtggtctgtccattcaattcacagagttgaaccttcctttttatggagcagttttgaaacactgtttttggagaatccgcaagtggatatttggagcgcttagaggcctatggtagaaaaagaaatatctgcctatgacaactagacagaagcattctgagaaacttctttgtgatgtttgcattcaactaccagagttgaaccttccttttgatagggcagtttggaaacactcttttcgcagaatctgcatgtggatatctggagcgatttgaggcctactgtccaaaaggaaatatcttcctgggaaaaatagacgaaagcattctcagaaactgctttgtgatatgtgcattcgactcaccgagttgaaactttttttggatagagcagttttgaaacactctgtagaatctgaaagtggatatttggagctctttgagggctatggcggaaaagaaaatatattcacattaaactagacagcagcattctcagaaacttctttaggatgtttgcagtaaactcaaagagttgaacatacctttccgtagagcagttttgaaacactctgtttgtgggatccgcaagtggatatttggaccgctttgagacctttgctggaaatgggaatacctgcacatttacactagacagaagcattctcagaaacttcttcgtgatgtgtgcattctactcccaaatttgaatcttccttttcatgaagcagttttgaaacactctgtttgtgcaatccacaattggataattggaacgctttgatgcccatggtagaaaaggaaatatcctcatataaaaactagacacaaggattcacagaaaatgctttgtgatgtgtgcattcaaatcacggagttgaatctttcttttgtcagagcagttttgaaacactgtttctgtggaatctgccagcggacacttggagcgctttgagggctatggtggagaaggaaatatcttccctaaaaattagaaagaagcattctcagaaacatttatgtgaagcgtgcattcaactcacagagttgaaccttccctttcatacaacagttttgaaacactcttttgaacaattgcaggtgaatctttggagcgctttgaagcctttgttggaaatgggaatatcttcacacacaaactagccagaagcattctcagaaacttctttgtgatgtgtgcgttgaacccagagagatgaacctttcctttgatagagcagttttgaaacgtgtttttgtaagatctgcaagcggataattggcttcgctttgtgtcctttggtggaaacgggaatatcttctaataaaaactagacagaaatattctcagaatcttctttgtgatgtgggcattcaactaacacagttgaacctttcttttcacagagcagttttgaaacacccttttggtagaatctgccagtggatatttggagcgctttgagggctattgtgccaacggaaatatctgcccctaaaaactagacagaagcattctcagtaaactactttgtgatgtttgcattcaactcacagagttgaacatacctcttcatagagcagttttgaaaacctctttttgtagaatctgcaagtggatattcggaccactttgaggccttcataggaaacagtaatatcttcacataaaaactagatagaagcattgtcagaaagttcgttgtgatgtgtgaattcaactcacagagttgaagcttcctttaatagagcagttttgaaacactctttttctagaatctgcaagtagatatttggagcgctttgaggccttcgttggaaaccggaatatcttcacataaaaagtagatagaggcattctcagaaactttttgtgatatgtagattcaactcacagcgttgaacctttctttggatggagcagttttgaaaaactcttttatcgaatctgcaggtagacatttggggtgctttgagggctgtggtgcaaaaggaaatgtcttcccatagaaactagactgaagcattctcagcaacttcttggtgacgtttgcattcatctcacagtgttgaacatacctttccatagagtggttttgaaacactgtttttgtataatcggcaagtggatatttggactgctttcaggccttcatcggaaacgggaatatcttcacataaacactagagagaagcattctcagaaacttctttgtgatctgtccattcaactcacagagttgaaccttcctttttatggagcagttttgaatcactgtttttggagaatctgcaagtggatatttggagcgctttgaggcctatggtagaaaaagaaatatctgcctctaaaaaccagacagaagcattccgagaaacttctttgtgatgtttgcattcaactagcagagttgaaccttccttttgatagggcagtttggaaacactctttttgtagaatctgcatgtggatatctggagtggtttgaggcctacggtcaaaaaggaaatatcttcctgggaaaaatagacgaaagcattctcagaaactgctttgtgatatgtgcattcgactcaccgagtttaaacttttttttgatagagcagttttgaaacactctgtagaatctgaaagtggatatttggagctctttgagggctatggcggaaaagaaaatatattcacattaaagtagacagcagcattctcagaaacttctttaggatgtttgcagtaaactcacagagttgaacatacctttccgtaaagcagttttgaaacactctgtttgtgggatccgcaagtggatatttggaccgctttgagacctttgctggaaatgggaatatcttcacatataaactagacagaagcattctcagaaacttcttcgtgatgtgtgcattgtactcccaaatttgaatcttccttctcatggagcagttttgaaacactctgtttgtgcaatctacaattggagaattggaacgcttggatgcccgtggtagaaaaggaaatatcctcatataaaaactagacagaaggattcacagaaaatgctttgtgatgtgtgcattcaaatcacggagttgaatctttcttttgtcagagcagttttggaacactgtttctgtggaatctgccagcggacacttggagcgctttgagggctatggtggagaaggaaatatcttcccataaaaactagagagaagcattctcagaaacatttatgtgaagcgtgcattcaactcacagagttgaaccttccttttgatacaacagttttgaaacactcttttgaacaattgcaggtgaatctttggagcgctttgaagcctttgttggaaatgggaatatcttcacacacaaactagccagaagcattctcagaaacttctttgtgatgtgtgcgttgaacccagagagatgaacctttccttcgatagagcagttttgaaacgtgtttttgtaagttcggcaagcggataattggcttcgctttgtgtcctttggtggaaacgggaatatcttctaataaaaactagacagagatattctcagaaacttctttgtgatgtgggcattcaactaacacagtcgaacatttcttttcacagagcagttttgaaacactcttttggacgaatctgccagtggatatttggagcgctttgagggctattgtgccaatggaaatatctgcccctaaaaactagacagaagcattctcagaaattactttgtgatgtttgcattcaactcacagatttgaacatacctcctcatagagcagttttgaaaacatctttttgtagaatctgcaagtggatattcggaccactttgaggccttcataggaaacagtaatatcttcacagaaaaactagatagaagcattgtcagaaagttctttgtgatgtgtgaattcaactcacagagttgaaccttcctttaatagagcagttttgaaacactctttttctagaatctgcaagtagatatttggagcgctttgaggccttctttggaaaccggaatatcttcacataaaaagtagatagaggcattctcagaaactctttgtgatatgtagattcaactcacagcgttgaacctttctttggatggagcagttttgaaaaactcttttatcgaatctgcaggtagacatttggggtgctttgagggctgtggtgcaaaaggaaatgtcttcccatagaaactagcctgaagcattctcagcaacttcttggtgacgtttgcattcatctcacagtgttgaacatacctttccatagagtggttttgaaacactgtttttgtagaatcggcaagtggatatttggactgctttcaggccttcatcggaaacgggaatatcttcacataaacactagagagaagcattctcagaaacttctctgtcatctgtccattcaactcacagagttgaaccttcctttttatggagcagtttggaaacactccttttggagaatctgcaagtggatatttgcagcgctttgaggcctatggtagaaaaagaaatatctgcctctgaaaaccagacagaagcattccgagaaacttctctgtgatgtttgcattcaactagcagagttgaaccttccttttgatagggcagtttggaaacactctttttgtagaatctgcatgtggatatctggagcggtttgaggcctacggtcaaaaaggaaatatcttcctgggaaaaatagacaaaagcattctcagaaactgctttgtgatatatgcattcgactcaccgagttgaaacttttttttgatagagcagttttgaaacactctgtagaatctgaaagtggatatttggagctctttgagggctatggcggcaaagaaactatattcacattaaagtagacagcagcattcccagaaacttctttaggatgtttgcagtaaactcacagagttgaacatacctttccgtagagcagttttgaaacactctgtttgtgggatccgcaagtggatatttggacccctttgagacctttgctggaaacgggaatatcttcacatataaactagacagaagcattctcagacacttcttggtgatgtgtgcattgtactcccaaatttgaatcttccttctcatggagcagttttgaaacactctgtttgtgcaatctactattggagaattggaacgcttggatgcccgtggtagaaaaggaaatatcctcatataaaaactagacagaaggattcacagaaaatgctttgtgatgtgtgcattcaaatcacggagttgaatctttcttttgttagagcagttttgaaacactgtttctgtggaatctgccagcggacacttggagcactttgagggctacggtggagaaggaaatatcttcacataaaaactagaaagaaagcattctcagaaccatttatgtgaagcgtgcattcaactcacagtagttgaaccttccttttgatagaacagttttgaaacactcttttgaacaattgcaggtgaatatttggagggctttgaagcctttgttggaaatgggtatatcttcacacacaaactagccagaagcattctcagaaacttctttgtgatgtgtgcgttgaacccagagagatgaaccattcctttgatagagcagttttgaaacgtgttttgtaagatctgcaagcggatagttggcttcgctttgtgtcctttggtggaaacgggaatatcttctaataaaaactagacagaaatattctcagaatctcctttgtgatgtgggcattcaactaacacagttgaacatttcttttcacagagcagttttgaaacactcttttggtagtatctgccagtggatatttggagcgcttggagggctattgtgccaatggaaatatctgcccctgaaaactagacagaagcattctcagaaactacttcgtgatgtttgcattcaacacacagagttgaacatacctcttcacagagcagttttgaaaacctctttctgtacaatctgcaagtggatattcggaccactttgaggccttcataggaaacagtaatatcttcacataaaaactagacagaagcattgtcagaaagttctttgtgatgtgtgaattcaactcacagagttgaaccttcctttaatagagcagttttgaaacactctttttctagaatctgcaagtagatacttggagcgctttgaggccttcgttggaaaccggaatatcttcacaggaaaagtagatagaggcattctcagaaacttttttgtgatatgtagattcaactcacagcgttgaacctttctttggatggagcagttttgaaaaactcttttatcgaatctgcaggtagacatttggggagctttgagggctgtggtgcaaaaggaaatgtcttcccatagaaactagactgaagcattctcagcaacttctttgtgacgtttgcattcatctcacagtgttgaacatacctttccatagagtagttttgaaacactgtttttgtagaatctgcaagtggatatttggaatgctttgaggccttcatcggaaacgggaatatcttcacataaacactagagagaagcattctcagaaacttctttgtgatctgtccattcaactcacagaggtgaaccttcctttttatggagcagttttgaaacactgtttttggagaatctgcaagtggatatttggagcgctttgaggcctatggtagaaaaagaaatatctgcttctaaaaaccagacagaagcattctgagcaaacttctttgtgatgtttgcattcaactaccagagttgaaccttccttttgatagggcagtttggaaacactctttttgtagaatctgcatgtggatatctggagcgatttgaggcctacggtccaaaaggaaatatcttcctgggaaaaatagacgaaagcattctcagaaactgctttgtgatatgtgcattcgactcaccgagttgaaacttttttttgatagagcagttttgaaacactctgtagaatctgaaagtggatatttggagctctttgagggctatgtcggaaaagaaaatatattcacattaaagtagacagcagcattctcagaaacttctttaggatgtctgcagtaaactcacagagttgaacatacctttccgtagagcagttttgaaacactctgtttgtgggatccgcaagtggatatttggacagctttgagatctttgctggaaatgggaatatcttcacatataaactagacagaagcattctcagaaacttcttcgtgatgtgcgcattctactcccaaatttgaatcttccttctcatgaagcagttttgaaacactctatttgtgcaatctacaattggataattggaaccctttgatgcccatggtagaaaaggaaatatcctcatataaaaactagacagaaggattcacagaaaatgctttgtgatgtgtgcattcaaatcacggagttgaatctttcttttgttagagcagttttgaaacactgtttctgtggaatctgccagcggacacttggagtgctttgagggctatggtggagaaggaaatatcttcacataaaaactagaaagaagcattctcggaaacatttatgtgaagcgtgccttcaactcacagagttgaaccttccttttgatagaacagttttgaaacactcttttgaacaattgcaggtgaatcctttggagcgctttgaagcctttgttggaaatgggaatatcttcacacacaaactagccagaagcattctcagaaacttctttgtgatgtgtgcgttgaacccagagagatgaacctttcctttgatagagcagttttgaaacgtgtttttgtaagatcggcaagtggataattggcttcgctttgtgtcctttggtggaaacgggaatatcttctaataaaaactagacagaaatattctcagaatcttctttgtgatgtgggcattcagctaacacagttgaacgtttcttttcacagagcagttttgaaacactcttttggtagaatctgccagtggatatttggagcgatttgagggctattgtgccaatggaaatatctgcccctaaaaactagacagaagcattctcagaaactgctttgtgatgtttgcattcaactcacagtgttgaacctacctcttcatagagcagtttggaaaacctcttcttgtagaatctgcaagtggatattcggaccactttgaggccttcataggaaacagtaatatcttcacataaaaactagatagaagcattgtcagaaagttctttgtgatgtgtgaattcaactcacagagttgaaccttcctttaatagagcagttttgaaacactctttttctagaatctgcaagtagatatttggagcgctttgaggccttcgttggaaagcggaacatcttcacaggaaaagtagatagaggcattctcagaaacttttttgtgatatgtagattcaactcacagcgttgaacctttctttggatggagcagttttgaaaaactcttttatcgaatctgcaggtagacatttggggtgctttgagggctgtggcgcaaaaggaaatgtcttcccatagaaactagactgaagcattctcagcaacttctttgtgacgtttgcattcatctcacagtgttgaacatacctttccatagggtagttttgaagcactatttttgtagaatctgcaagtggatatttggactgctttgtggccttcatcggaaaggggaatatcttcacataaacactagacagaagcattctcagaaacttctttgtgatctgtccattcaactcacagagttgaaccttcctttttatggagcagttttgaaacactgtttttggagaatctgcaagtggatatttggagcgccttgaggcctatggtagaaaaagaaatatctgcctctaaaaactagacagaagcattctgagaaacttctttgtgatgtttgcattcatataccagagttgaacctttcttttgatagggcagtttggaaacactctttttgtagaatctgcatgtggatatctggagcgatttgaggcctacggtccaaaaggaaatatcttcctgggaaaaatagacgaaagcattctcagaaactgctttgtgatatgtgcattcgactcaccgagttgaaacttttttttgatagagcagttttgaaacactctgtagaatctgaaagtggatatttggagctctttgagggctatggcggaaaagaaaatatattcacattaaactagacagcagcattctcagaaagttctttaggatgtttgcagtaaactcacagagtttaacttacctttccgtagagcagctttgaaacactctgtttgtgggatccacaagtggatatttggaccgctttgagacctttgctggaaatgggaatatcttcacatataaaccagacagaagcattttcagaaacttcttcgtgatgtgtgcattctactcccaaatttgaatcttccttctcatgaagcagttttgaaacactctgtttgtgcaatccacaattggataattggaaagctttgatgcccatggtagaaaaggaaatatcctcatataaaaactagacagaaaggattcacagaaaatgctttgtgatgtgtgcattcaaatcacggagttgaatctttcttttgtcagagcagttttgaaacactgttactgtggaatcttccagcggacacttggagcgctttgagggctatggtggagaaggaaatatcttcacataaaaactagaaagaagcattctcagaaccatttatgtgaagcgtgcgttcaactcacagagttgaaccttccttttgatagaacagttttgaaacactcttttgaacaattgcaggtgaatatttggagggctttgaagcctttgttggaaatgggaatatcttcacacacaaactagccagaaacattctcagaaacttctttgtgatgtgtgcgttgaacccagagagatgaacctttcctttgaaagagcagttttgaaacgtgtttttgtaagatcggcaagcggataattggattcgctttgtgtcctttggtggaaacgcgaatatcttctaataaaaactagacagaaatattctcagaatctcctttgtgatgtgggcattcaactaacacagttgaacatttcttttcacagagcagttttgaaacactcttttggtagaatctgccagtggatatttggagcgcttggagggctactgtgccaatggaaatatcctgcccctgaaaactagacagaagcattctcagaaactgctttgtgatgtttgcattcaactcacagagttgaacatacctcttcatagatcagttttgaaaacctctttttgtagaatctgcaagtggatatttggaccactttgaggccttcatagatacagtaatatcttcacataaaaactagatggaaagcattgtcagaaagttctttgtgatgtgtgaattcaactcacagagttgaaccttcctttaatagagcagttttgaaacactctttttctagaatctgccagtagatatttggagcgctttgaggccttcgttggaaacaggaatatcttcacataaaaagtagatagaggcattctcagaaacttttttgtgatatgtagattcaactcacagcgttgaacctttctttgcatggagcagttttgaaaatcccttttatcgaatctgcaggtagacatttggggtgctttgagggctgtggtgcaaaaggaaatgtcttcccatagaaactagactgcagcattctcagcaacttcttggtgacgtttgcattcatctcacagtgttgaacatacctttccatagagtggttttgaaacactgtttttgtagaatcggcaagtggatatttggactgctttgaggccttcatcggaaacgggaatatcttcacataaacactagagagaagcatcctcagaaacttctttgtcatctgtccattcaactcacagagttgaaccttcctttttctggagcagttttgaaacactctttttggagaatctgcaagtggatatttggagcgctttgaggcctatggtagaaaaagaaatatctgcctctaaaaaccagacagaagcattccgagaaacttctctgtgatgtttgcattcaactagcagagttgaaccttccttttgatagggcagtttggaaacactctttttgtaaaatctgcatgtggatatctggagcggtttgacgcctacggtcaaaaaggaaatatcttcctgggaaaaatagacgaaagcattctcagaaagtgctttgtgatatgtgcattcgactcaccgagttgaaacttttttttgatagagcagttttgaaacactctgtagaatctgaaagtggatatttggagctctttgagggctatggcggaaaagaaaatatattcacattaaagtagacagcagcattctcagagacttctttaggatgtttgcagtaaactcacagagttcaacatacctttccgtaaagcagttttgaaaccctctgtttgtgggatctgcaagtggatatttggaccgctctgagacctttgctggaaatgggaatatcttcacatataaactagacagaaagcattctcagaaacttcttcgtgatgtgtgcattctactcccgaatttgaatcttccttttcatgaagcagttttgaaacactctgtttgtgcaatccacaattggataattggaacgctttgatgcccatggtagaaaaggaaatatcctcatataaaaactagacagaaagattcacagaaaatgctttgtgatgtgtgcattcgaatcacgcagttgaatctttcttttcttagagcagttttgaaacactgtttctgtggaatctgccagcggacacttggagcgctttgagggctatggtggagaaggaaatatcttcccataaaaactagaaagaagcattctcggaaacatttatgtgaagcgtgcattcaactcacagagttgaaccttccttttgatggaacagttttgaaacactcttttgaacaattgcaggtgaatctttggagcgctttgaagcctttgttggaaatgggaatatcttcacacacaaactagccagaagcattctcagaaacttctttgtgatgtgtgcgttgaacccagagagatgaacctttccttggatagagcagttttgaaacgtgtttttgtaagatcggcaagtggataattggcttcgctttgtgtcctttggtggaaacgggaatatcttctaataaaaactagacagaaatattctcagaatcttctttgtgatgtgggcattcaactaacacagttgaacatttcttttcacagagcagttttgaaacactcttttggtggaatctgccagtggatatttggagcgctttgagggctattgtgccaatgcaaatatcttcccctaaaaactagacagaagcattctcagaaactgcttcgggatgtttgcattcaactcacagagttgaacatacctctgcatagagcagttttgaaaacctctttttgtagaatctgcaagtggatattcggaccactttgaggccttcatgggaaacagtagtatcttcacataaaaactagatagaagcattgtcagaaagttctttgtgatgtgtgaattcaactcacagagttgaaccttcctttaatagagcagttttgaaacactctttttgtagaatctgcaagtagatttttggagcgctttgaggccttctttggaaaccggaatatcttcacataaaaagtagatagaggcattctcagaaacttttttgtgatatgtagattcaactcacagcgttgaacctttctttggatggagcagttttgaaaaactcttttattgaatctgcaggtagacatttggggtgctttgagggctgtggtgcaaaaggaaatgtcttcccatagaaactagactgaagcattctcagcaacttctttgtgacgtttgcattcatctcacagtgttgaacatacctttccatagagtagttttgaagcactatttttgtagaatctgcaagtggatatttggactgctttgaggccttcatcggaaacgggaatatcttcacataaacactagacagaagcattctcagaaacttctttgtggtctgtccattcaactcacagagttgaaccttcctttttatggagcagttttgaaacactgtttttggaggatctgcaagtggatatttggagcgctttgaggcccatggtagaaaaagaaatatgtgcctatgacaactagacagaagcattccaagaaacttctctgtgatgtttgcattcaactagcagagttgaaccttccttttgatagggcagtttggaaacactctttttgtagaatctgcatgtggatatctggagcggtttgaggcctacggtcaaaaaggaaatatcttcctgggataaatagacgaaagcattctcagaaactgctttgtgatatgtgcattcgactcaccgagttgaaacttttttttgatagagcagttttgaaacactctgtagaatctgaaagtggatatttggagctctttgagggctatggcggaaaagaaaatatattcacattaaactagagaggagcattcccagaaacttctttaggatgtttgcagtaaactcacagagttgaacatacctttccgtagagcagttttgaaacactctgtttgtggtatccgcaagtggatatttggaccgctttgagacctttgctggaaacgggaataccttcacatataaactagacagaagcattctcagaaacttcttcgtgatgtgtgcattctactcccaaatttgaatcttccttttcatgaagcagttttgaaacactctgtttgtgcaatccacaattggataattggaacgctttgatgcccatggtagaaaaggaaatatcctcatataaaaactagacagaagaattcacagaaaatgctttgtgatgtgtgcattcaaatcacggagttgaatctttcttttgtcagagcagttttgaaacactgtttctgtggaatctgccagcggacacttgcagcgctttgagggctatggtggagaaggaaatatcttcccataagaactagaaagaagcattctcagaaacatttttgtgaagcgtgcattcaactcacagagttgaaccttccttttgatacaacagttttgaaacactcttttgaacaattgcaggtgaatctttggagcgctttgaagcctttgttggaaatgggaatatcttcacacacaaactagccagaagcattctcagaaacttctttgtgatgtgtgcgttgaacccagagagatgaacctttcctttgatagagcagttttgaaacgtgtttttgtaagatctgcaagcggatagttggcttcgctttgtgtcctttggtggaaacgggaatatcttctaataaaaactagacagaaaatattctcagaatcttctttgtgatgtgggcattcagctaacacagttgaacgtttcttttcacagagcagttttgaaacactcttttggtagaatctgccagtggatatttggagcgctttgagggctattgtgccaatggaaaatctgcccctaaaaactagacagaagcattctcagaaactgctttgggatgtttgcattcaactcacagagttgaacatacctctgcatagagcagttttgaaaacctctttttgtagaatctgcaagtggatattcggaccactttgaggccttcataggaaacagtaatatcatcacataaaaactagatagaagcattgtcaggaagttctttgtgatgtgtgaattaaactcacagagttgaaacttcctttaatagagcagtgttgaaacactctttttctagaatctgcaagtagatatttggggcgcttggaggccttcgttgtaaaccggaatatcttcacaggaaatgtagatagaggcattctcagaaacttttttgtgatatgtagattcaactcacagcgttgaacctttctttggatggagcagttttgaaaaactcttttatcgaatctgcaggtagacatttggggtgctttgagggctgtggtgcaaaaggaaatgtcttcccatagaaactagactgaagcattctcagcaacttcttggtgacgtttgcattcatctcacagtgttgaacatacctttccatagagtggtcttgaaacactgtttctgtagaatcggcaagtggatatttggactgctttgaggccttcatcggaaacgggaatatcttcacataaacactagagagaagcattctcagaaacttctttgtgatctgtccgttcaactcacagagttgaaccttcctttttatggagcagttttgaaacactgtttgtggagaatctgcaagtggatatttggagcgccttgaggccaatggtagaaaaagaaatatctgcctctaaatactagactgaagcattccgagaaacttctctgtgatgtttgcattcaactagcagagttgaaacttccttttgatagggcagtttggagacactctttttttagaatctgcatgtggatatctggagcggtttgaggcctacggtcaaaaaggaaatatcttcctgggaaaaatagacgaaagcattctcagaaattgctttgtgatatgtgcattcgactcaccgagttgaaacttttttttgatagagcagttttgaaacactctgtagaatctgaaagtggatatttggagctctttgagggctatggcggaaaagaaaatatattcacattaaagtagacagcagcattcccagaaacttccttaggatgtttgcagtaaactcacagagttgaacacacctttccatagagcagttttgaaacactctgtttgtggaatccgcaagtggatatttggaccgctttgagacctttgctggaaacgggaatatcttcacatataaactggacagaagcattctcagaaacttcttcgagatgtgtgcagtctactcccgaatttgaatcttccttttcatgaagcagttttgaaacactctgtttgtgcaatccacaattggataattggaacgctttgatgcccatggtagaaaaggaaatatcctcatataaaaactagacagaaggattcacagaaaatgctttgtgatgtgtgcattcaaatcacggagttgaatctttcttttgtcagagcagttttgaaacactgtttctgtggaatctgccagcggacacttgcagcgctttgagggctatggtggagaaggaaatatcttcccataagaactagaaagaagcattctcagaaacatttatgtgaagcgtgcattcaactcatagagttgaaccttccttttgatacaacagttttgaaacactctttggaacaattgcaggtgaatctttggagcgctttgaagcctttgttggaaatgggaatatcttcacacacaaactagccagaagcattctcagaaacttctttgtgatgtgtgcgttgaacccagagagatgaacctttcctttgatagagcagttttgaaacgtgtttttgtaagatcggcaagcggataattggcttcgctttgtgtcctttggtggaaacgggcatgtcttctaataaaaactagacagagatattctcagaaacttctttgtgatgtgggcattcacctaacacagttgaacatttcttttcacaaagcagttttgaaacactcctttggtcgaatctgccagtggatatttggagcgctttgagggctattgtgccaatggaaatatctgcccctaaaaactagacagaagcattctcagaaactgctttgtgatgtttgcattcaactcacagagttgaacatacctcttcatagagcagttttgaaaacccctttttgtagaatctgcaagtggatatttggaccactttgaggccttcatagaaaacagtaatatcctcacataaaaactagatggaaacattgtcagaaagttctttgtgatgtgtgaattcaactcacagagttgaaccttcctttaatagagcagttttgaaacactctttttctagaatctgcaagtagatatttggagcgctttgaggccttcgttggaaaccggaatatcttcacaggaaaagtagatagaggcattctcagaaacctttttgtgatatgtagattcaactcacagagttgaacctttctttggatggagcagttttgaaaaacccttttatcgaatctgcaggtagacattcggggtgctttgagggctgtggtgcaaaaggaaatgtcttcccatagaaacttgactgaagccttctcagcaacttctttgtgacgtttgcattcatctcacagtgttgaacatgcctttccctagagtagttttgaaacactatttttgtagaatctgcaagtggacatttggactgctttgaggccttcatcggaaacgggaatatcttcacataaacactagacagaagcattctcagaaacttctttgtgatctgtccattcaactcacagagttgaaccctcctttttatggagcagttttgaaacactgtttttggagaatctgcaagtggatatttggagcgctttgaggcctatggtagaaaaagaaatatctgcccctaaaaactagacagaagcattctgagaaacttctttgtgatgtttacattcacctaccagagttgaaccttccttttgatagggcagtttggaaacactctttttgtagaatctgcatgtggatatctggagcgatttgaggcctactgtccaaaaggaaatatcttcctgggaaagatagacgaaagcattctcagtaaactgctttgtgatatgtgcattcgactcaccgagttgaaacatttttttgatagagcagttttgaaacactctgtagaatctgaaagtggatatttggagctctttgagggctatggcggaaaagaaaatatattcacattaaactagacagccagcattctcagaaacttctttaggatgtttgcagtaaactcacagagttgaacatacctttccgtagagcagttttgaaacactctgtttgtgggatccgcaagtggatatttggaccgctttgagacctttgctggaaatgggaatatctgcacatataaactagacagagcattctcagaaacttcttcgtgatgtgtgcattgtactcccaaatttgcatcttccttctcatggagcagttttgaaacactctgtttgtgcaatctacaattggagaattggaacgcttggatgcctgtggtagaaaaggaaatatcctcatataaaaactagacagaaggattcacagaaaacgctttgtgatgtgtgcattcaaatcacggagttgaatctttcttttgttagagcagttttgaaacactgtttctgtggaatctgccagcggacacttggagcgctttgagggctatggtggagaaggaaatatcttcacataaaaactagaaagaagcattctcagaaacatttatgtgaagcgtgcattcaactcacagagttgaaccttccttttgatacaacagttttgaaacactcttttgaacaattgcaggtgaatctttggagcgctttgaagcctttgttggaaatgggaatatcttcacacacaaactagccggaagcattctcagaaacttctttgtgatgtgtgcgttgaacccagagagatgaacctttcctttgatagagcagttttgaaacgtgtttttgtaagatcggcaagcggataattggcttcgctttgtgtcctttggtggaaacgggaatatcttctaataaaaactagacagaaatattctcagaatctcctttgtgatgtgggcattcaactaacacaattgaacatttcttttcacagagcagttttgaaacacagttttggtagaatctgccagtggatatttggagcgcttggagggctactgtgccaatggaaatatctgcccctgaaaactagacagaagcattctcagaaactgcttcgtgatgtttgcattcaactcacagggttgaacatacctctgcatagagcagttttgaaaacctctttttgtagaatctgcaagtggatattcggaccactttgaggatttcataggaaacagtaatatcttcacataaaaactagatagaagcattgtcagaaagttctttgtgatgtgtgaattcaactcacagagttgaaccttcctttattagagcagttttgaaacactctttttctagaatctgcaagtagatatttggagggctttgaggccttcgttggaaaccggaatatcttcacataaaaagtagatagaggcattctcagaaacttttttgtgatatgtagattcaactcacagtgttgaacctttctttggatggagcagttttgaaaaactcttttatcgaatgtgcaggtagacatttggggtgctttgagggctgtggtgcaaaaggaaatgtcttcccatagaaactagactgaagcattctcagcaacttcttggtgacgtttgcattcatctcacagtgttgaacatacctttccatagagtggttttgaaacactctttttgtagaatcggcaagtggatatttggactgctttcaggccttcatcggaaacgggaatatcttcacataaacaccagagagaagcattctcagaaacttctttgtcatctgtccattcaactcacagagttgaaccttcctttttatggagcagttttgaaacactcattttggagaatctgcaagtggatatttggagcgctttgaggcctatggtagaaaaagaaatatctgcctctaaaaaccagacagaagcattctgagaaacttctttgtgatgtttacattcaactaccagagttgaaccttccttttgatagggcagttcggaaacactccttttgtagaatctgcatgtggatatctggagcgatttgaggcctacggtccaaaaggaaatatcttcctgggaaaaatggacgaaagcattctcagaaagtgctttgtgatatgtgcattcgactcaccgagttgaaacttttttttgatagagcagttttgaaacactctgtagaatctgaaagtggatatttggagctctttgagggctatggcggaaaagaaaatatattcacgttaaaaaagtagacagcagcattctcagaaacttctttaggatgtttgcagtaaactcacagagttgaacatacctttccatagagcagttttgaaacactctgtttgtgggatccgcaaggggatatttggaccgctttgagacctttgctggaaatgggaatatcttcacatataaactagacagaagcattctcagaaacttctttcgtgatgtgtgcattctcctcccgaatttgaatcttccttttcatgaagcagttttgaaacactctgtttgtgcaatccacaattggataattggaacgctttgatgcccatggtagaaaaggaaatatcctcatataaaaactagacagaaggattcacagaaaatgctttgtgatgtgtgcattcaaatcacggagttgaatctttcttttgttagatcagttttgaaacactgtttctgtggaatctgccagcggacacttggagcgctttgagggctacggtggagaaggaaatatcttcacatagaaactagaaagaagcattctcagaaccatttatgtgaagcgtgcattcaactcacagcagttgaaccttccttttgatagaacagttttgaaacactcttttgaacaattgcaggtgaatatttggagggctttgaagcctttgttggaaatgggaatatcttcacacacgaactagccagaagcattctcagaaacttctttgtgatgtgtgcgttgaacccagagagatgaacctttcctttgatagagcagttttgaaacgtgtttttgtaagatctgcaagcggatagttggcttcgctttgtgtcctttggtggaaacgggaatatcttctaataaaaactagacagaaaatattctcacaatctcctttgtgatgtgggcattcaactaacacagttgaacatttcttttcacagagcagttttgaaacactcttttggtagaatctgccagtggatatttggagcgctttgagggctgttgtgccaatggaaatatctgcccctaaaatctagacagaagcattctcagaaactacttcgtgatgtttgcattcaactcacagagttgaacatacctcttcacagagcagttttgaaaacctctttttgtagaatctgcaagtggatattcggagcactttgaggccttcataggaaacagtaatatcttcgcataaaaactagatagaagcattgtcagaaagttctttgtgatgtgtgaattcaactcacagagttgaaccttcctttaatagagcagttttgaaacactctttttctagaatctgccagtagatatttggagcgctttgagtccttcgttggaaaccggaatatcttcacataaaaagtagatagaggcattctcagaaacttttttgtgatatgtagattcaactcacagcgttgaacctttctttggatggagcagttttgaaaaactcttttatcgaatctgcaggtagactttcggggtgctttgagggctgtggtgcaaaaggaaatgtcttcccatagaaactagactgaagcattctcagcaacttcttttgacgtttgcattcatctcacagtgttgaacatacctttccatagagtagttttgaaacactgtttttgtagaatcggcaagtggatatttggactgctttgaggccttcatcggaaacgggaatatcttcacataaacactagagagaagcattctcagaaacttctttgtggtctgtccattcaactcacagagttaaaccttactttttatggagcagttttgaaacactgttttcggacgaactgcaagtggatatttggagcgctttgaggcctatggtagaaaaagaaatatctgcctatgacagctagacagaagcattccgagaaacttctttgtgatgtttgcattcaactagcagagttgaaccttccttttgatagggcagtttggaaacactctttttgtagaatctgcatgtggatatctggagcggtttgaggcctacggtcaaaaaggaaatatcttcctgggaaaaatagacgaaagcattctcagaaactgctttgtgatatgtgcattcgactctccgagttgaaactttctttggatagagcagttttgaaacactctgtagaatctgaaagtggatatttggagctctttgagggctatggcggaaaagaaaagatattcacattaaactagacagcagcattctcagaaacttctttaggatgtttgcagtaaactcacagagttgaacctacctttccgtagagcagttttgaaacactctgtttgtgggatccgcaagtggatatttggaccgctttgagacctttgctggaaatgggaatatcttcacatatagaactagacagaagcattctcagaaacttcttcgtgatgtgtgcattctactcccaaatttgaatcttccttctcattaagcagttttgaaacactctatttgtgcaatctacaattggagaattggaacacttggatgcccgtggttgaaaaggaaatatcctcatataaaaactagacagaaggattcacagaaaatgctttgtgatgtgtgcattcaaatcacggagttgaatctttcttttgttagagcagttttgaaacactgtttctgtggaatctgccagcggacacttggagcgctttgagggctatggtggagaaggaaacatcttcccataaaaactagaaagaagcattctcagaaccatttatgtgaagcgtccattcaactcacagagttgaaccttccttttgatagaacagttttgaaacactcttttgaacaattgcaggtgaatatttggagggctttgaagcctttgttggaaatgggaatatcttcacacacaaactagccagaagcattctcagaaacttctttgtgatgtgtgcgttgaacccagagagatgaacctttcctttgatagagcagttttgaaacgtgtttttgtaaggtctgcaagcggataatgggcttcgctttgtgtcctttggtggaaacgggaacatcttctaattaaaactagacagaaatattctcagaatctcctttgtgatgtgggcattcaactaacacaattgaacatttcttttcacagagcagttttgaaacacagttttggtagaatctgccagtggatatttggagcgcttggagggctattttgccaatggaaatatctgcccctgaaaactagacagaagcattctcagaaactacttcgtgatgtttgcattcaacacacagagttgaacatacctcttcacagagcagttttgaaaacctctttctgtagaatctgcaagtggatattcggaccactttgaggccttcataggaaacagaaatatcttcacataaaaactagatagaagcattgacagaaagttctttgtgatgtgtgaattcaactcacagagttgaaccttcctttaatagagcagttttgaaacactctttttctagaatctgcaagtagatatttggagcgctttgaggccttcgttggaaaccggaatatcttcacaggaaaagtagatagaggcattctcagaaacttttttgtgatatgtagattcaactcacaagcgttgaacctttctttggatggagcagttttgaaaaactcttttatcgaatctgcaggtagacatttggggagctttgagggctgtggtgcaaaaggaaatgtcttcccatagaaactagactgaagcattctcagcaacttcttggtgacgtttgcattcatctcacagtgttgaacatacctttccatagagtagttttgaaacactgtttttgtagaatcggcaagtggatatttggactgctttgaggccttcatcggaaacgggaatatcttcacataaacactagagagaagcattctcagaaacttctttgtgatctgtccattcaacccacagagttgaaccttcctttttatggagcagttttgaaacactccttttgaagaatctgcaagtggatatttggagcgctttgaggcctatggtagaaaaagaaatatctgcctctaaaaaccagacagaagaattctgagaaacttctttgtgatgtttgcattcaactaccagaggtgaaccttccttttgatagggcagtttggaaacactctttttgtagaatctgcatgtggatatctggagcgatttgaggcctacggtccaaaaggaaatatcttcctgggaaaaatagacgaaagcattctcagaaactgctttgtgatatgtgcattcgactcaccgagttgaaactttttttggatagagcagttttgaaacactctgtagaatctgaaagtggatatttggagctctttgagggctatggcggaaaagaaaatatattcacaataaaccagacagcagcactctcagaaacttctttaggatgtttacagtaaactcacagagttgaacatacctttccgtagagcagttttgaaacactctgtttgtgggatccgcaagtggatatttggacctctttgagacctttgctggaaatgggaatatcttcacatataaactagacagaaagcattctcagaaacttcttcgtgatgtgtgcattctcctcgcaaatttgaatcttccttttcatgaagcagttttgaaacactctgtttgtgcaatccacaattggataattggaacgctttgatgcccatggtagaaaaggaaatatcctcatataaaaactagacagaaggattcacagaaaatgctttgtgatgtgtgcattcaaatcacggagttgaatctttcttttgtcagagcagttttgaaacactgtttctgtggaatctgccagcggacacttggaacgctttgagggctacggtggagaaggaaatatcttcccataaaaactagaaagaagcattctcagaaacatttatgtgaagcgtgcattcaactcacagagttgaaccttccttttgatacaacagttttgaaacactcttttgaacaattgcaggtgaatctttggagcgctttgaagcctttgttggaaatgggaatatcttcacacacaaactagccagaagcattctcagaaacttctttgtgatgtgtgcgttgaacccagagagatgaacctttccttcgatagagcagttttgaatcgcgtttttgtaagatcggcaagcggataattggcttcgctttgtgtcctttggtggaaacgggaatatcttctaataaaaactagacagaaatattctcagaatctcctttgtgatgtgggcattcaactaacacagttgaacatttcttttcacagagcagttttgaaacactcttttggtcgaatatgccagtggatatttggagcgcttggagggctattgtgccaatggaaatatctgcccctgaaaactagacagaagcattctcagaaactgctttgtgatgtttgcattcaactcacagagttgaacataccttttcatagagcagttttgaaaacctctttttgtagaatctgcaagaggatattcggaccactttgaggccttcataggaaacagtaatatcttcacataaaaactagatagaagcattgtcagaaagttctttgtgatgtgtgaattccactcacagagttgaaccttcctttaatagagcagttttgaaacactctttttctagaatctgcaagtagatatttggagcgctttgaggccttctttggaaaccggaatatcttcacataaaaagtagatagaggcattctcagaaactttttcgtgatatgtggattcaactcacagcgttgaacctttcttttgatagagcagttttggaaaactcttttatcgaatctgcaagtagacatttggagtgctttgagggctgtggtgcaaaaggaaatgtcttcccatagaaactagactgaagcattctcagcaacttctttgtgacgtttgcattcatctcacagtgttgaacatacctttccatagagtagttttgaaacactatttttgtagaatctgcaagtggatatttggactgctttgaggccttcatcggaaacgggaatatcttcacataaacactagacggaagcattctcagaaacttctttgtgatctgtccattcaactcacaggagttgaaccttcctttttatggagcagttttgaatcactgtttttggagaatctgcaagtggatatttggagcgctttgaggcctatggtagaaaaagaaatatctgcctctaaaaaccagacagaagcattctgagaaacttctttgtgatgtttgcattcaactaccagagttgaaccttccttttgatagggcagtttggaaacactctttttgtagaatctgcatgtggatatctggagcgatttgaggcctacggtcaaaaaggaaatatcttcctgggaaaaatagacgaaagcattctcagaaagtgctttgtgatatgtgcattcgactcaccgagttgaaacttttttttgatagagcagttttgaaacactctgtagaatctgaaagtggatatttggagctccttgagggctatggcggaaaagaaaatatattcacattaaagtagacagcagcattctcagaaacttctttaggatgtttgcagtaaactcgcagagtttaacatacctttccgtagagcagttttgaaacactctgtttgtgggatccgcaagtggatatttggaccgctttgagacctttgctggaaatgggaatatcttgacgtataaactagacagaagcattctcagaaacttcttcgtgatgtgtgcattgtactcccaaatttgaatcttccttctcatggagcagttttgaaacactctgtttgtgcaatctacaattggagaattggaacgcttggatgcccgtggtagaaaaggaaatatcctcatataaaaactagacagaaaggattcacagaaaatgctttgtgatgtgtgcattcaaatcacggagttgaatttttcttttgttagagcagttttgaaacactgtttctgtggaatctgccagcggacacttggagcgctttgagggctatggtggagaaggaaatatcttcacataaaaactagaaagaagcattctcagaaccatttatgtgaagcgtgcgttcaactcacagagttgaaccttccttttgatagaacagttttgaaacactcttttgaacaattgcaggtgaacatttggagggctttgaagcctttgttggaaatgggaatatcttcacacacaaactagccagaagcattctcagaaatttctttgtgatgtgtgcgttgaacccagagagatgaacctttcctttgatagagcagttttgaaacgtgtttttgtaagatctgcaagcggatagttggcttcgctgtgtgtcctttggtggaaacgggaatatcttctaataaaaactagacagaaatattctcagaatcttctttgtgatgcgggcattcacctaacacagttgaacgtttcttttcacagagcagttttgaaacactcttttggtagaatctgccagtggatatttggagcgctttaagggctattgtgccaatggaaatatctgcccctaaaaactagacagaagcattctcagaaactacttcgtgatgtttgcattcaacacacagagttgaacatacctcttcacagagcagttttgaaaacctctttctgtagaatctgcaagtggatattcggaccactttgaggccttcataggaaacagtaatatcttcgcataaaaactagatagaagcattgtcagaaagtactttgtgatgtgtgaattcaactcacagagttgaaccttcctttaatagagcagttttgaaacactctttttctagaatctgcaagtagatatttggagcgctttgaggccttcgttggaatccggaatatcttcacataaaacgtagatagaggcatgctcagaaacttttttgtcatatgtagattcaactcacagcgttgaacctttcttttgatagagcagttttgaaaaactcttttatcgaatctgcaagtagacatttggagtgctttgagggctctggtgcaaaaggaaatgtcttcccatagaaactagactgaatcattctcagcaacttcttggtgacgattgcattcatctcacagtgttgaacatacctttgcatagagtagtttcgaaacactatttttgtagaatctgcaagtggacatttggactgctttgaggccttcatcggaaacgggaatatcttcacataaacactagacagaagcattctcagaaacttctttgtgatctgtccattcacctcacagagctgaactttcctttttatggagcagttttgaaaaactgtttttggagaatctgcaagtggatatttggagcgctttgaggcttatggtagaaaaaaaatatctgcccctaaaaaccagacagaagcattctgagaaacttctttgtgatgtttgccttcaactaccagagttgaaccttccttttgatagggcagtttggaaacactctttttgtagaatctgcatgtggatatctggagcgatttgaggcctacggtccaaaaggaaatatcttcctgggaaagatagacgaaagcattctcagaaactgctttgtgatatgtgcattcgactcaccgagttgaaacttttttttgatagagcagttttgaaacactctgtagaatctgaaagtggatgtttggagctctttgagggctatggcggaaaagaaaatatattcacattaaactagacagcagcattctcagaaacttctttaggatgtttgcagtaaactcacagagttgaacatacctttccgtagagcagttttgaaacactttgtttgtgggttccgcaagtggatatttggaccgctttgagacctttgctggaaatgggaatatcttcacgtataaactagacagaagcattctcagaaacttcttcctgatgtgtgcattctcctcccgaatttgaatcttccttttcatgaagcagttttgaaacactctgtttgtgcaatccacaattggataattggaacgctttgatgcccatggtagaaaaggaaatatcttcatataaaaactagacagaaggattcacagaaaatgctttgtgatgtgtgcattgaaatcacggagttgaatctttcttttgttagagcagttttgaaacactgtttctgtggaatctgccagcggacacttggagcgctttgagggctatggtggagaaggaaatatcttcacataaaaactagaaagaagcattctcagaaacatttatgtgaagcgtgcattcaactcacagagttgaaccttccttttgatacaacagttttgaaacacccttttgaacaattgcgggtgaatctttggagcgctttgaagcctttgttggaaatgggaatatcttcacacacaaactagccagaagcattctcagaaacttctttgtgatgtgtgcgttgaacccagagagatgaacctttcctttgatagagcagttttgaaacgtgtttttgtaagatcggcaagcagataactggcttagctttgtgtcctttggtggaaacgggaatatcttctaataaaaactagacagaaatattctcagaatctcctttgtgatgtgggcattcaacaaacacaattgaacatttcttttcacagagcagttttgaaacacagttttggtagaatctgccagtggatatttggagcgcttggagggctattgtgccaatggaaatatctgcccctgaaaactagacagaggaattctcagaaactactttgtgatgtttgcattcaactcacagagttgaacatacctcttcatagagcagttttgaaaacctctttttgtagaatctgcaagtggatattcggaccactttgaggccttcataggaaacagtaataccttcacataaaaattagatagaagcattgtcagaaagttctttgtgatgtgtgaattcaactcacagagttgaaccttcctttaatagagcagttttgaaacactttttttctggaatctgcaagtagatatttggagcgctttgaggccttcgttggaaaccggagtatcttcacaggaaaagtagataggggcattctcagaaacttttttgtgatatgtagattcaactcacagcgttgaacctttctttggatggagcagttttgaaaaactcttttatcgaatctgcaggtagacatttggggtgcttttagggctgtggtgcaaaaggaaatgtcttcccatagaaactagactgaagcattctcagcaacttctttgtgacgtttgcattcatctcacagtgttgaacatacctttccatagagtagttttgaagcactatttgtgtagaatctgcaagtggatatttggactgctttgaggccttcatcggaaacgggaatatcttcacataaacactagacagaagcattctcagaaacttctttgtcatctgtccattcaactcatagagttgaaccttcctttttatggagcagttttgaaacactccttttggagaatctgcaagtggatatttggagcgctttgaggccaatggtagaaaaagaaatatctgcctctaaaaaccagacagaagcattctgagaaacttctttgtgatgtttgccttcaactaccagagttgaaccttccttttgataaggcagtttggaaacactctttttgtagaatctgcatgtggatatctggagcgatttgaggcctacggtccaaaaggaaatatcttcctgggaaagatagacgaaagcattctcagaaactgctttgtgatatgtgcattcgactcaccgagttgaaactttttttggatagagcagttttgaaacactctgtagaatctgaaagtggatatttggagctctttgagggctatggcagaaaagaaaagatattcacattaaactagacagcagcattctcagaaacttctttaggatgtttgcagtaaactcacagagttgaacatacctttccgtagagcagttttgaaacactctgtttgtgggatccgcaagtggatatttggaccgctttgagacctttgctggaaatgggaatatcttcacatataaactagacagaagcattctcagaaacttcttcgtgatgtgtgcattctactcccgaatttgaatcttccttttcatgaagcagttttgaaacactctgtttgtgcaatccacaattggataattggaacgctttgatgcccatggtagaaaaggaaatatcctcatataaaaaccagacagaaggattcacagaaaatgctttgtgatgtgtgcattcaaatcacggagttgaatctttcttttgttagagcagttttgaaacacggtttctgtggaatctgccagcggacacttggagcgctttgagggctatggtggagaaggaaatatcttcccataaaaactagaaagaagcattctcagaaacatttatgtgaagccgtgcattcaactcacagagttgaaccttccttttgatagaacagttttgaaacactcttttgaacaattgcaggtgaatctttggagcgctttgaagcctttgttggaattgggaatatcttcacacacaaactagccagaagcattctcagaaacttctttgtgatgtgtgcgttgaacccagacagatgaacctttcctttgattagagcagttttgaaacgtgtttttgtaagatctgcaagcggataattggcttcgctttgtgtcctttggtggaaacgggaatatcttctaataaaaagtagacagaaatattctcagaatctcctttgtgatgtgggcattcaactaacacagttgaacatttcttttcacagagcagttttgaaacactcttttggtagaatctgccagtggatatttggagcgcttggagggctattgtgccaatggaaatatctgcccctgaaaactagacagaagcattctcagaaactacattgtgatgtttgcattcgactcacagagttgaacatacctcttcatagagcagttttgaaaaccttttttgtagaatctgcaagtggatattcggaccactttgaggccttcataggaaacagtaatatcttcacataaaaactagatagaagcattgtcaggaagttctttgtgatgtgtgaattcaactcacagagttgaaccttcctttaatagagcagttttgaaacactctttttctagaatctgcaagtagatatttggagcgcttggaggacttcgttggaaaccggaatatcttcacaggaaatgtagatagaggcattctcagaaactttttcgtgatatgtggattcaactcacagcgttgaacctttcttttgatagggcagttttgtaaaactcttttatcgaatctgtaagtagacatttggagtgctttgagggctgtggtgcaaaaggaaatgtcttcccatagaaactagactgaatcattctcagcaacttcttggtgacgtttgcattcatctcacagtgttgaacatacctttgcatagagtagtttcgaaacactatttttgtagaatctgcaagtggacatttggactgctttgaggccttcatcggaaacgggaatatcttcaacataaacactagacagaagcattctcagaaacttctttgtgatctgtccattcaactcacagagttgaaccttcctttttctggagcagttttgaaacactctttttggagaatctgcaagtggatatttggagcgctttgaggcctatggtagaaaaagaaatatctgcccctaaacaccagacagaagcattctgagaaacttctttgtgatgtttgcattcaactaccagagttgaaccttccttttgatagggcagtttggaaacactctttttgtagaatctgcatgtggatatctggagcgatttgaggcctacggtcaaaaagggaaatatcttcctgggaaaaatagacgaaagcattctcagaaactgctttgttatatatgcattcgactctccgagttgaaacttttttttgatagagcagttttgaaacactctgtagaatctgaaagtggatatttggagcactttgagggctatggcggaaaagaaattatattcacatgaatctagacagcagcattctcagagacttctttaggatgtttgcagtaaactcacagagttgaacatacctttccgtaaagcagttttgaaaccctctgtttgtgggatctgcaagtggatatttggaccgctttgagacctttgctggaaatgggaatatcttcacatataaactagacagaagcattctcagaaacttcttcgtgatgtgtgcattctcctcccgaatttgaatcttccttttcatgaagcagttttgaaacactctgtttgtgcagtccacaattggataattggaacgctttgatgcccatggtagaaaaggaaatatcctcatataaaaactagacataaggattcacagaaaatgctttgtgatgtgtgcattcaaatcacagagttgaatctttcttttgtcagagcagttttgaaacactgttactgtggaatctgccagcggacacttggagcgctttgagggctatggtggagaaggaaatatcttcccataaaaactagaaagaagcattctcagaaacatttatgtgaagcgtgcattcaactcacagagttgaaccttccttttgatacaacagttttgaaacactctttggaacaattgcaggtgaatctttggagcgctttgaagcctttgttggaaatgggaatatcttcacacacaaactagccagaagcattctcagaaacttctttgtgatgtgtgcgttgaacccagagagatgaacctttcctttgatagagcagttttgaaacgtgtttttgtaagatctgcaagcggatagttggcttcgctttgtgtacctttggtggaaacgggaatatcttctaataaaaactagacagaaatattctcagaatcttctttgtgttgtgggcattcaactaacacagttgtacgtttcttttcacagagcagttttgaaacactcttttggtagaatctgccagtggatatttggagcgctttgagggctattgtgccaatggaaatatcttcccctaaaaactagacagaagcattctcagaaactacttcgtgatgtctgcattcaacacacagagttgaacatacctcttcacagagcagttttgaaaacctctttctgtagaatctgcaagtggatattcggaccactttgaggccttcgtaggaaacagtaatatcttcacataaaaactagatagaagcattgtcagaaagttctttgtgatgtgtgaattcaactcacagagttgaaccttcctttaatagagcagttttgaaacactctttttctagaatctgcaagtagatatttggagcgctttgaggccttcgttggaaaccggaatatcttcacaggaaaagtagatagaggcattctcagaaacttttttgtgatatgtagattcaactcacagcgttgaacctttcttttgatagagcagttttgaaaaactcttttatcgaatctgcatgtagacatttggagtgctttgagggctgtggtgcaaaaggaaatgtcttcccatagaaactagactgaagcattctcagcaacttctttatgacgtttgcattcatctcacagtgttgaacatacctttccatagagtagttttgaaacactatttttatagaatctgcaagtggatatttggactgctctgaggccttcatcggaaacgggaatatcttcacataaacactagacagaagcattctcaggaaacttctttgtgatctgtccattcaactcacagagttgaaccttcctttttatggagcagttttgaatcactgtttttggagaatctgcaagtggatatttggagcgctttgaggcctatggtagaaaaagaaatatctgcttctaaaaaccagacagaagcattctgagaaacttctctgtgatgtttgcattcaactagcagagttgaaccttccttttgatagggcagtttggaaacactctttttgtagaatctgcatgtggatatctggagccgtttgaggcctacggtcaaaaaggaaatatcttcctgggaaaaatagacgaaagcattctcagaaactgctttgtgatatgtgcattcgactgaccgagttgaaacttttttttgatagagcagttttgaaacactctgtagaatctgaaagtggatatttggagctctttgagggctatggcggaaatgaaactatattcacattaaagtagacagcagcattctcagaaacttctttaggatgtttgcagtaaactcacagagttgaacctacctttccgtagagcagttttgaaacactctgtttgtgggatatgcaagtggatatttggacagctttgagaactttgctggaaatgggaatatcttcacatataaactagacagaagcattctcagaaacttcctcgtgatgtgtgcattctactcccgaatttgaatcttccttttcatgaagcaattttgaaacactctgtttgtgcgatccacaattggataattggaacgctttgatgcccatggtagaaaaggaaatatcctcatatgaaaactagacagaaggattcacagaaaatgctttgtgatgtgtgcattcaaatcacggagttgaatctttcttttgtcagagcagttttgaaacactgtttctgtggaatctgccagcggacacttggagcgctttgagggctgtggtggagaaggaaatatcttcccataaaaactagaaagaagtattctcagaaacatttatgtgaagcgtgcattcaactcacagagttgaaccttacttttgatacaacagttttgaaacactcttttgaacaattgcaggtgaatctttggagcgctttgaagcctttggtggaaatgggaatatcttcacacacaaactagccagaagcattctcagaaacttctttgtgatgtgtgcgttgaacccagagagatgaacctttcctttgatagagcagttttgaaacgtgtttttgtaagatctgcaagcggataattggcttcgctttgtgtcctttgttggaaacgggaatatcttccaataaaaactagacagaaatattctcagaatctcctttgtgatgtgggcattcaactaacacagttgaacatttcttttcacagagcagttttgaaacactcttttggtagaatctgccagtggatatttggagcgcttggagggctattgtgccaatggaaagatctgcccctgaaaactagacagaagcattctcagaaactacttcgtgatgtctgcattcaacacacagagttgaacatacctcttcacagagcagttttgaaaacctctttctgtagaatctgcaagtggatattcggaccactttgaggccttcataggaaagagtaatatcttcacataaaaactagatagaagcattgtcagaaaattctttgtgatgtgtgaattcaactcacagagttgaaccttccttcaatagagcagttgtgaaacactctttttctagaatctgcaagtagatatttggagcgctttgaggccttcgttggaatccggaatatcttcacaggaaaagtagatagaggcattttcagaaacttttttgtgatatgtagattcaactcacagcgttgaacctttctttggatggagcagttttgaaaaacccttttatcgaatctgcaggtagacatttggggtgctttgagggctgtggtgcaaaaggtaatgtcttcccatagaaactagactgaagcattctcagcaacttctttgtgacgtttgcattcatctcacagtgttgaacatacctttgcatagagtagttttgaaacactatttttgtagaatctgcaagtggatatttggactgctttgaggccttcatcggaaacgggaatatcttcacataaacactggacagaagcaatctcagaaacttctttgtgatctgtccattcaactcacagagttgaaccttcctttttatggagcagttttgaaacactgttcttggagaatctgcaagtggatatttggagcgctttgaggcctgtggtagaaaaagaaatatctgcctctaaaaactagacagaagcattctgagaaacttctttgtgatgtttgcattcaactatcagagttgaaccttccttttgatagggcagtttggaaacactctttttgtagaatctgcatgtggatatctggagcggtttgaggcctacggtcaaaaaggaaatatcttcctgggaaaaatagacgaaagcattctcagaaactgctttgtgatatgtgcattcgactctccgagttgaaactttttttggataaagcagttttgaaacactctgtagaatctgaaagtggatatttggagctctttgagggctatggcggaaaagaaaagatattcacattaaactagacagcagcattcccagaaacttctttaggatgtttgcagtaaactcacagagttgaacatacctttccgtagagcagctttgaaacactctgtgtgtgggatccgcaagtggatatttggaccgctttgagacctttgctggaaacgggaatatcttcacatataaactggacagaagcattctcagaaacttcttcgtgacgtgtgcattgtactcccaaatttgaatcttgcttctcatggagtagttttgaaacactctgtttgtgcaatctacaattggagaattggaaggcttggttgcccgtggtagaaaaggaaatatcctcatataaaaactggacagaaggattcacagaaaatgctttgtgatgtgtgcattcaaatcacggagttgaatctttcttttgttagagcagttttgaaacacggtttctgtggaatctgccagaggacacttggagcgctttgagggctatggtggagaaggaaatatcttcccataaaaactggaaagaagcattctcagaaacatttatgtgaagcgtgcattcaactcacagagttgaaccttcctttggatacaacagttttgaaacactcttttgaacaattgcaggtgaatctttggagcgctttgaagcctttgttggaaatgggaatatcttcacacacaaactagccagaagcattctcagaaacttctttgtgatgtgtgcgttgaacccagagagatgaacctttcctttgatagagcagttttgaaacgtgtttttgtaagatcggcaagcggatatttggcttcgctttgtgtcctttggtggaaacgggaatatcttctaataaaaactagacagagatattctcagaaacttctttgtgatgtgggtattcaactaacacagtcgaacatttcttttcacagagcagttttgaaacactcttttggtcgaatctgccagtggatatttggagcgctttgagggctattgtgccaatggaaatatctgcccctaaaaactagacagaagcattctcagaaactacttcgtgatgtttgcattcaacacacagagttgaacatacctcttcacagagcagttttgaaaacctctttctgtagaatctgcaagtggatattcggaccactttgaggccttcataggaaacagtaatatcttcacataaaaactagatagaagcattgtcagaaagttctttgtgatgtgtgaattcaactcacagagttgaaccttcctttaatagagcagttttgaaacactctttttctagaatctgccagtagatatttggagcgctttgaggccttctttggaaaccggaatatcttcacataaaaagtagatagaggcattctcagaaacttttttgtgatatgtagattcaactcacagcgttgaacctttctttggatggagcagtttagaaaaactcttttattgaatctgcaggtagacatttggggtgctttgagggctgtggtgcaaaaggaaatgtcttcccatagaaactagactgaagcattctcagcaacttctttgtgacgtttgcattcatctcacagtgttgaacatacctttccatagagtagttttgaaacactgtttgtgtagaatcggcaagtggatatttggactgctttgaggccttcatcggaaacgggaatatcttcacataaacactagagagaagcattctcagaaacttctttgtgatctgtccattcaactcacagagatgaccttcctttttatggagcagttttgaatcactgtttttggagaatctgcaagtggatatttggagcgctttgaggcctatggtagaaaaagaaatatctgcctctaaaaaccagacagaagcattccgagaaacttctctgtgatgtttgcattcaagtagcagagttgaaccttccttttgatagggtagtttggaaacactctttttgtagaatctgcatgtggatatctggagcggtttgaggcctacggtcaaaaaggaaatatcttcctgggaaaaatagacgaaaacattctcagaaactgctttgtgatatgtgcattcgactcaccgagttgaaactttttttggatagagcagttttgaaacactctgtagaatctgaaagtggatatttggagctctttgagggctatggcggaaaagaaaatatattcacattaaactagacagcagcattctcagaaacttctttaggatgtttgcagtaaactcacagagttgaacatacctttccgtagagcagttttgaaacactctgtttgtgggatccgcaaggggatatttggaccgctttgagacctttgctggaaatgggaatatcttcacatataaactagacagaaacattctcagaaacttcttcgtgatgtgtgcattctcctcccgaatttgaatcttccttttcatgaagcagttttgaaacactctgtttgtgcaatccacaattggataattggaacgctttgatgcccatggtagaaaaggaaatatcctcatataaaaactagacagaaggattgacagaaaatgctttgtgatgtgtgcattcaaatcacggagttgaatctttcttttgttagagcagttttgaaacactgtttctgtggaatctgccagcggacacttggagcgctttgagggctgtggtggagaaggaaatatcttcccaaaaaaactagaaagaagcattctcagaaacatttatatgaagcgtgcattcaactcacagagttgaaccttccttttgatacaacagttttgaaacactcttttgaacaattgcaggtgaatctttggagcgctttgaagcctttgttggaaatgggaatatcttcacacacaaactagccagaaatattctcagaatcttctttgtgatgtgggcattcaactaacacagttgaacatttcttttcacagagcagttttgaaacactcttttggtagaatctgccagtggatatttggagcgctttgagggctattgtgccaatgcaaatatctgcccctaaaaactagacagannnnnnnnnnnnnnnnnnnnnnnnnnnnnnnnnnnnnnnnnnnnnnnnnnnnnnnnnnnnnnnnnnnnnnnnnnnnnnnnnnnnnnnnnnnnnnnnnnnnctctgtttgtaaagtcggcaagtggatattcagacctctttgaggccttcgttggaaacgggatttcttcatattctgctagacagaagaattctcagtaacttccttgtgttgtgtgtattcaactcacagagttgaacgatcctttacacagagcagacttgaaacacactttttgtggaatttgcaagtggagatttcagcctctttgaggtcaatggtagaataagaaatatcttcctatagaaactagacagaatgattctcagaaactcctttgtgatgtgtgcgttcaactcacagagtttaacctttcttttcatagagcagttaggaaacactctgtttgtaaagtctgcaagtggatattcagacctccttgaggccttcgttggaaacgggatttcttcatattctgctagacagaagaattctcagaaacttccttgtgttgtgtgttttcaactcacagagttgaacgatcctttacacagagcagacttgaaacactctttttgtggaatttgaaagtggagatttcagccgatttgtggtcaatggtagaaaacgaaatatcttcgtacaaaaacaagacagaatgattctcagaaactcctttgtgatgtgtgcgttcaactcacagagtttaacctttcttttcatagaatagttaggaaacactctgtttgtaaagtctgcaagtggatattcagatctccttgaggccttcgttggaaacgggatttcttcatattctgctagagagaagaattctcagtaacttccttgtgttgtgtgtattcaactcacagagttcaaccatcctttacacagagcagacttgaaacactcttcttgtggaatttgcaagtggagatttcagccgctttgaggtcaatggtagaaaaggaaatatcttcgtataaatctagacagaatcattctcagaaactgctctgtgatgtgtgcgttcaactctcagagtttaacttttcttttcattcagcagtttggaaacactctgtttgtaaagtctacacgtggatattttgaccacttagagaccttcgttggaaacgggtttttttcatgtaaggctagacagaagaattcccagtaacttccttgtgttgtgtgcattcaactcacagagatgaacgttcccttagacagagcagatttgaaacactctatttgtgcaatgtgcaagtgtagatttcaagcgctttaaggtcaatggcagaaaagaaaatatcttcttttcaaaactagacagaatcattcccacaaactgcgttgtgatgttttcgttcaactcacagggtttaacctttcttttcatagagcagttaggaaacactctgtttgtaaagtctctaagtggatatactgacatcttgttgccttctttggaaacgggatttcttcatattctgctatacagaagaattctcagaaacttccttgtgttgtgtgttttcaactcacagagttgaacgatgcttcacacagagtagacttgaaacactctttttgtggaatttgcaagtggagatttcagccgctttgaggtcaatggtagaataggatatatgttcctatagaaaattgacagaatgattgtcagaaactccttggtgctgtgtgcgttcaactcacagagtttaacctttcttttcatagagcagttaggaaacactctgtttgtaaagtctgcaagtggatattcagacctctttgaggccttcgttggaaacgggatttcttcatattctgctagagagaagaattctcagtaacttccttctgttgtgtgtattcaactcacagagttcaacgatcctttacacagagcagacttgaaacactctttttgtggaatttgcaagtggacatttcagccgctttgaggtcaatggtagaaaaggatatatcttcgtataaaaactagacagaattattctcagaaactcctttgtgatgtgtgcgttcaactcacagagtttaacctttcttttcgtagagcagttaggaaacactctgtttgtaaagtcggcaagtggatattcagacctctttggggccatcgttggaaatgggatttcttcatattctgctagacagaagaattctcagtaacttccttgtgttgtgtgtattcaactgacagagttgaacgatcctttacacagagcagacttgaaacacactttttgtggattttgcaagtggagatttcagcctctttgagatcaatggtagaataggaaatatcttcctatagaaactagacagaatgattctcagaaactcctttgtgatgtgtgcgttcaacacacagagtttaacctttcttttcgtagagcagttaggaaacactctgtttgtaaagtcggcaagtggatattcagacctctttgaggccatcgttggaaatgggatttcttcatattctgctagacagaagaattctcagtaacttccttgtgttgtgtgtattcaactgacagagttgaacgatcctttacacagagcagacttgaaacactctttttgtggaatttgcaagtggagatttcagccgctttgaggtcaatggtagaaaaggaaatatctgcgtataaaaactagacagaatgattctcagaaactcctttgtgatgtgtgcgttcaactcacagagtttaacctttcttttcatagagcagttaggaaacactctgtttgtaaactctgcaagtggatattcagacatcttagaggctttcgttggaaacgggaattcttcatattctgctatacagaagaattcttagaaacttccttgtgttgtgtgttttcaactcacagagttgaacgatgctttacacagagtagacttgaaacactctttttgtggaatttgcaagtggagatttcagccgctttgaggtcaatggtagaaaaggaaatatcttcgtataaaaactagacagaatgattctcagaaactcctttgtgatgtgtgcgttaaactcacagagtttaacctttcttttcatagaacagttaggaaacactctgtttgtaaagtctgcaagtggatattcagacctctttgaggccttcgttggaaacgggatttcttcatattctgctagagagaagaattctcagtaacttctttctgttgtgtgtattcaactcacagagttcaacgatcctttacacagagcagacttgaaacagtctttttgtggaatttgcaattggagatttcagccgcattgaggtcaatggtagaaaaggaaatatcttcgtataaaaactagacagaatgattctcagaaactcctttgtgatgtgtgcgttcaactcacagagtttaacctttcttttcttagagcagttaggaaacactctgtttgtaaagtctgcaagtggatattcagacctccttgaggccttcgttggaaacgggatttcttcatattatgccagacagaagaattctcagtaacttccttgtgttgtgtgtattcaactcacagagttcaacgatcctttacacagagcagacttgaaacactcttcttgtggaatttgcaagttgagatttcagccgctttgaggtcaatggtagaatagggaatatcatcctatagaaactagacagaatgattctcagaatctcctttgtgatgtgtgcgttcaactcacagagtttaacctttcttttcgtagagcagttaggaaacactctgtttgtaaagtcggcaagtggatattcagacctcccttgaggccttcgttggaaacgggatttctacattttatgctagacagaagaattctcagtaactaccttgtgttgtgtgtattcaactcacagagttgaacgatcctttacagagagcagacttgaaacactctttttgtggaatttgcaagtggagatttcagccgctttgaggtcaatggtagaataggaaatatcttcctatagaaactagacagaatgattctcagaaactcctttgtgatgtgtgcgttcaactcacagagtttaacctttcttttcaaaaagcagttaggaaacactctgtttgtaaagtctgcaagtggatattcagacatctttgaggctttccctggaaatgggatttcttcatattctgatatacagaagaattctcagaaatttccttgtgttgtgtgttttcaactcacagagttgaacgatgctttacacagagtagacttgaaacactctttttgtggaatttgcaagtggagatttcagccgctttgaggtcaatggtagaaaaggaaatatcttcgtataaaaactagacagaatgattctcagaaactcctttgtgatgtgtgcgttcaactcacagagtttaaccttcttttcatagagcagttaggaaacactctgtttgtaaagtcnnnnnnnnnnnnnnnnnnnnnnnnnnnnnnnnnnnnnnnnnnnnnnnnnnnnnnnnnnnnnnnnnnnnnnnnnnnnnnnnnnnnnnnnnnnnnnnnnnnnttgtcatgtgtgcgttcaacacacagaatttaatcaattaggacctcttgaggcatttgttggaaaacggattcttcgtaaaatgctagactgaagaattctcaggaaattctttgtgttgtgtgtattcaactcacagagtagaaccttcctttaaacagagcagatttgaaacactctttttgtggaattttcaagtggagatttcaaacgcttgaggccaatggtagaaaaggaaatatcttcgtataaaaattagacagaatcattctcaacaactgctttgtgatgtgtgtgttcaacacagagagtttaaccaattaggacctctttgaggcatttgttggaaaatggatttcgtcgtaaaatgctggacagaagaattctcaggaacttctttgtgttgtgtgtattcaactcacagagtagaaccttcctttagacagagaagatttgaaacactctttttgtggaatttgcaactgcagatttcaagcgctttgaggccaatggtagaaaaggaaatatctttgtatacaaacaagacagaatcattctcagaaaatgctttgtgttgtgtgcattcaacacacagagtttaacctttcttttcatagagcagtttggaaacactctgtttgtaaagtctggaagtggatatttggacctctttgaggccttcattggaaacgggatttcttcatataatgctacacagaagaattctcagtaacttctttgtgttgtgggtattcacctcacagaattgaaacttcctttagacagagcaaatttcatacacactttttgtgtaatttgcaacgggagatttcaagcgctttaatgtcaatggtagaaaaagaaataacttcgtgtaaaaactagagagaatcatttccagaaagtgctttgtgatgtgtgcgttaaactcacagagtttaacctttcttttcatagagcagttgggaaacactcggtttgaaagtctgccaaaggatatttggacctccttgaggccttcgttggaaacgtgatttcatcatataatgctagaaagaagaattctcagtaacttatttgtgttgtgtgtattaacgaacagagttgaatcttccattagacagagcagatttgaaacactctctttgtcgaattttcagtaggagattccaagcgctttaaggccaaaagtagaaaagggaatatcttcgtataaaagacagacagaatcattctcagaaactacttcatgatgtgtgcgttcaactcacagagtttaacctttcttttcatggagcagtttggaaacacactgttgtaaagtgggcaagtggacatttggacctctttgaggccttggttggaaacgagatttttcatataatgctagacagaagaattctcagttacttctttgtgctgtgtgtattcaactcacagagttctacattcctttagacagagcagatttgaaacacgctttttgtggaatttgcaagtggagatttcaagcgatttgaggccaatggtagaaaaggaaatatcttcatataaaaactcgacagaatcattctcacaaactgctttgtgttgtgtgcgttccacacacggagtttaacctttcttttcatagagcagtttgcaaactctctgtttgtaaagtctgcaagtggatattggacctctttgaggccttcattggtaacgggatttcttcatataatggtggacagaagaattctgagtaacttctttgtgttgtgggtattcacctcacagaattcaaccttcctttaggcagagcagatttgaaacactctttttgaggaatttgcaagtggagatttcaagcgctttgaggccaatggtagaaaaggaaatatcttcgtataatcaccagacagaatcattctcagaaactactttgtgatgtttgctttcaactcacagagtttaacctttcttttcatagagcagtttggaaacactctgtttgtaaagtctgcaagtggatattcggacgtctttgaggccttcgttggaatggggttttcttcatataatgctagaaagaagaattctcagtaacttttttgtgttgtgtgtattcaactcacagagttgaaccttcctttagacagagcaaatttgaaacactatttttgtggaatttgcaagtggagatttcaagcgctttgaggccaatggttgaaaagaataaacttcgtataaaaactagacagaatcattctcagaaactactttgtgatgtgtgtgttcaactcagggagtttaacctttcaattcacacagcagtttgaaaacactctgtttataaagtctgcaagtggatagttgcacctctttgacgtcttcgttggaaacgggatttcttcatatgatgctacgcagaagaatcacagnnnnnnnnnnnnnnnnnnnnnnnnnnnnnnnnnnnnnnnnnnnnnnnnnnnnnnnnnnnnnnnnnnnnnnnnnnnnnnnnnnnnnnnnnnnnnnnnnnnnnnnnnnnnnnnnnnnnnnnnnnnnnnnnnnnnnnnnnnnnnnnnnnnnnnnnnnnnnnnnnnnnnnnnnnnnnnnnnnnnnnnnnnnnnnnnnnnnnnnnnnnnnnnnnnnnnnnnnnnnnnnnnnnnnnnnnnnnnnnnnnnnnnnnnnnnnnnnnnnnnnnnnnnnnnnnnnnnnnnnnnnnnnnnnnnnnnnnnnnnnnnnnnnnnnnnnnnnnnnnnnnnnnnnnnnnnnnnnnnnnnnnnnnnnnnnnnnnnnnnnnnnnnnnnnnnnnnnnnnnnnnnnnnnnnnnnnnnnnnnnnnnnnnnnnnnnnnnnnnnnnnnnnnnnnnnnnnnnnnnnnnnnnnnnnnnnnnnnnnnnnnnnnnnnnnnnnnnnnnnnnnnnnnnnnnnnnnnnnnnnnnnnnnnnnnnnnnnnnnnnnnnnnnnnnnnnnnnnnnnnnnnnnnnnnnnnnnnnnnnnnnnnnnnnnnnnnnnnnnnnnnnnnnnnnnnnnnnnnnnnnnnnnnnnnnnnnnnnnnnnnnnnnnnnnnnnnnnnnnnnnnnnnnnnnnnnnnnnnnnnnnnnnnnnnnnnnnnnnnnnnnnnnnnnnnnnnnnnnnnnnnnnnnnnnnnnnnnnnnnnnnnnnnnnnnnnnnnnnnnnnnnnnnnnnnnnnnnnnnnnnnnnnnnnnnnnnnnnnnnnnnnnnnnnnnnnnnnnnnnnnnnnnnnnnnnnnnnnnnnnnnnnnnnnnnnnnnnnnnnnnnnnnnnnnnnnnnnnnnnnnnnnnnnnnnnnnnnnnnnnnnnnnnnnnnnnnnnnnnnnnnnnnnnnnnnnnnnnnnnnnnnnnnnnnnnnnnnnnnnnnnnnnnnnnnnnnnnnnnnnnnnnnnnnnnnnnnnnnnnnnnnnnnnnnnnnnnnnnnnnnnnnnnnnnnnnnnnnnnnnnnnnnnnnnnnnnnnnnnnnnnnnnnnnnnnnnnnnnnnnnnnnnnnnnnnnnnnnnnnnnnnnnnnnnnnnnnnnnnnnnnnnnnnnnnnnnnnnnnnnnnnnnnnnnnnnnnnnnnnnnnnnnnnnnnnnnnnnnnnnnnnnnnnnnnnnnnnnnnnnnnnnnnnnnnnnnnnnnnnnnnnnnnnnnnnnnnnnnnnnnnnnnnnnnnnnnnnnnnnnnnnnnnnnnnnnnnnnnnnnnnnnnnnnnnnnnnnnnnnnnnnnnnnnnnnnnnnnnnnnnnnnnnnnnnnnnnnnnnnnnnnnnnnnnnnnnnnnnnnnnnnnnnnnnnnnnnnnnnnnnnnnnnnnnnnnnnnnnnnnnnnnnnnnnnnnnnnnnnnnnnnnnnnnnnnnnnnnnnnnnnnnnnnnnnnnnnnnnnnnnnnnnnnnnnnnnnnnnnnnnnnnnnnnnnnnnnnnnnnnnnnnnnnnnnnnnnnnnnnnnnnnnnnnnnnnnnnnnnnnnnnnnnnnnnnnnnnnnnnnnnnnnnnnnnnnnnnnnnnnnnnnnnnnnnnnnnnnnnnnnnnnnnnnnnnnnnnnnnnnnnnnnnnnnnnnnnnnnnnnnnnnnnnnnnnnnnnnnnnnnnnnnnnnnnnnnnnnnnnnnnnnnnnnnnnnnnnnnnnnnnnnnnnnnnnnnnnnnnnnnnnnnnnnnnnnnnnnnnnnnnnnnnnnnnnnnnnnnnnnnnnnnnnnnnnnnnnnnnnnnnnnnnnnnnnnnnnnnnnnnnnnnnnnnnnnnnnnnnnnnnnnnnnnnnnnnnnnnnnnnnnnnnnnnnnnnnnnnnnnnnnnnnnnnnnnnnnnnnnnnnnnnnnnnnnnnnnnnnnnnnnnnnnnnnnnnnnnnnnnnnnnnnnnnnnnnnnnnnnnnnnnnnnnnnnnnnnnnnnnnnnnnnnnnnnnnnnnnnnnnnnnnnnnnnnnnnnnnnnnnnnnnnnnnnnnnnnnnnnnnnnnnnnnnnnnnnnnnnnnnnnnnnnnnnnnnnnnnnnnnnnnnnnnnnnnnnnnnnnnnnnnnnnnnnnnnnnnnnnnnnnnnnnnnnnnnnnnnnnnnnnnnnnnnnnnnnnnnnnnnnnnnnnnnnnnnnnnnnnnnnnnnnnnnnnnnnnnnnnnnnnnnnnnnnnnnnnnnnnnnnnnnnnnnnnnnnnnnnnnnnnnnnnnnnnnnnnnnnnnnnnnnnnnnnnnnnnnnnnnnnnnnnnnnnnnnnnnnnnnnnnnnnnnnnnnnnnnnnnnnnnnnnnnnnnnnnnnnnnnnnnnnnnnnnnnnnnnnnnnnnnnnnnnnnnnnnnnnnnnnnnnnnnnnnnnnnnnnnnnnnnnnnnnnnnnnnnnnnnnnnnnnnnnnnnnnnnnnnnnnnnnnnnnnnnnnnnnnnnnnnnnnnnnnnnnnnnnnnnnnnnnnnnnnnnnnnnnnnnnnnnnnnnnnnnnnnnnnnnnnnnnnnnnnnnnnnnnnnnnnnnnnnnnnnnnnnnnnnnnnnnnnnnnnnnnnnnnnnnnnnnnnnnnnnnnnnnnnnnnnnnnnnnnnnnnnnnnnnnnnnnnnnnnnnnnnnnnnnnnnnnnnnnnnnnnnnnnnnnnnnnnnnnnnnnnnnnnnnnnnnnnnnnnnnnnnnnnnnnnnnnnnnnnnnnnnnnnnnnnnnnnnnnnnnnnnnnnnnnnnnnnnnnnnnnnnnnnnnnnnnnnnnnnnnnnnnnnnnnnnnnnnnnnnnnnnnnnnnnnnnnnnnnnnnnnnnnnnnnnnnnnnnnnnnnnnnnnnnnnnnnnnnnnnnnnnnnnnnnnnnnnnnnnnnnnnnnnnnnnnnnnnnnnnnnnnnnnnnnnnnnnnnnnnnnnnnnnnnnnnnnnnnnnnnnnnnnnnnnnnnnnnnnnnnnnnnnnnnnnnnnnnnnnnnnnnnnnnnnnnnnnnnnnnnnnnnnnnnnnnnnnnnnnnnnnnnnnnnnnnnnnnnnnnnnnnnnnnnnnnnnnnnnnnnnnnnnnnnnnnnnnnnnnnnnnnnnnnnnnnnnnnnnnnnnnnnnnnnnnnnnnnnnnnnnnnnnnnnnnnnnnnnnnnnnnnnnnnnnnnnnnnnnnnnnnnnnnnnnnnnnnnnnnnnnnnnnnnnnnnnnnnnnnnnnnnnnnnnnnnnnnnnnnnnnnnnnnnnnnnnnnnnnnnnnnnnnnnnnnnnnnnnnnnnnnnnnnnnnnnnnnnnnnnnnnnnnnnnnnnnnnnnnnnnnnnnnnnnnnnnnnnnnnnnnnnnnnnnnnnnnnnnnnnnnnnnnnnnnnnnnnnnnnnnnnnnnnnnnnnnnnnnnnnnnnnnnnnnnnnnnnnnnnnnnnnnnnnnnnnnnnnnnnnnnnnnnnnnnnnnnnnnnnnnnnnnnnnnnnnnnnnnnnnnnnnnnnnnnnnnnnnnnnnnnnnnnnnnnnnnnnnnnnnnnnnnnnnnnnnnnnnnnnnnnnnnnnnnnnnnnnnnnnnnnnnnnnnnnnnnnnnnnnnnnnnnnnnnnnnnnnnnnnnnnnnnnnnnnnnnnnnnnnnnnnnnnnnnnnnnnnnnnnnnnnnnnnnnnnnnnnnnnnnnnnnnnnnnnnnnnnnnnnnnnnnnnnnnnnnnnnnnnnnnnnnnnnnnnnnnnnnnnnnnnnnnnnnnnnnnnnnnnnnnnnnnnnnnnnnnnnnnnnnnnnnnnnnnnnnnnnnnnnnnnnnnnnnnnnnnnnnnnnnnnnnnnnnnnnnnnnnnnnnnnnnnnnnnnnnnnnnnnnnnnnnnnnnnnnnnnnnnnnnnnnnnnnnnnnnnnnnnnnnnnnnnnnnnnnnnnnnnnnnnnnnnnnnnnnnnnnnnnnnnnnnnnnnnnnnnnnnnnnnnnnnnnnnnnnnnnnnnnnnnnnnnnnnnnnnnnnnnnnnnnnnnnnnnnnnnnnnnnnnnnnnnnnnnnnnnnnnnnnnnnnnnnnnnnnnnnnnnnnnnnnnnnnnnnnnnnnnnnnnnnnnnnnnnnnnnnnnnnnnnnnnnnnnnnnnnnnnnnnnnnnnnnnnnnnnnnnnnnnnnnnnnnnnnnnnnnnnnnnnnnnnnnnnnnnnnnnnnnnnnnnnnnnnnnnnnnnnnnnnnnnnnnnnnnnnnnnnnnnnnnnnnnnnnnnnnnnnnnnnnnnnnnnnnnnnnnnnnnnnnnnnnnnnnnnnnnnnnnnnnnnnnnnnnnnnnnnnnnnnnnnnnnnnnnnnnnnnnnnnnnnnnnnnnnnnnnnnnnnnnnnnnnnnnnnnnnnnnnnnnnnnnnnnnnnnnnnnnnnnnnnnnnnnnnnnnnnnnnnnnnnnnnnnnnnnnnnnnnnnnnnnnnnnnnnnnnnnnnnnnnnnnnnnnnnnnnnnnnnnnnnnnnnnnnnnnnnnnnnnnnnnnnnnnnnnnnnnnnnnnnnnnnnnnnnnnnnnnnnnnnnnnnnnnnnnnnnnnnnnnnnnnnnnnnnnnnnnnnnnnnnnnnnnnnnnnnnnnnnnnnnnnnnnnnnnnnnnnnnnnnnnnnnnnnnnnnnnnnnnnnnnnnnnnnnnnnnnnnnnnnnnnnnnnnnnnnnnnnnnnnnnnnnnnnnnnnnnnnnnnnnnnnnnnnnnnnnnnnnnnnnnnnnnnnnnnnnnnnnnnnnnnnnnnnnnnnnnnnnnnnnnnnnnnnnnnnnnnnnnnnnnnnnnnnnnnnnnnnnnnnnnnnnnnnnnnnnnnnnnnnnnnnnnnnnnnnnnnnnnnnnnnnnnnnnnnnnnnnnnnnnnnnnnnnnnnnnnnnnnnnnnnnnnnnnnnnnnnnnnnnnnnnnnnnnnnnnnnnnnnnnnnnnnnnnnnnnnnnnnnnnnnnnnnnnnnnnnnnnnnnnnnnnnnnnnnnnnnnnnnnnnnnnnnnnnnnnnnnnnnnnnnnnnnnnnnnnnnnnnnnnnnnnnnnnnnnnnnnnnnnnnnnnnnnnnnnnnnnnnnnnnnnnnnnnnnnnnnnnnnnnnnnnnnnnnnnnnnnnnnnnnnnnnnnnnnnnnnnnnnnnnnnnnnnnnnnnnnnnnnnnnnnnnnnnnnnnnnnnnnnnnnnnnnnnnnnnnnnnnnnnnnnnnnnnnnnnnnnnnnnnnnnnnnnnnnnnnnnnnnnnnnnnnnnnnnnnnnnnnnnnnnnnnnnnnnnnnnnnnnnnnnnnnnnnnnnnnnnnnnnnnnnnnnnnnnnnnnnnnnnnnnnnnnnnnnnnnnnnnnnnnnnnnnnnnnnnnnnnnnnnnnnnnnnnnnnnnnnnnnnnnnnnnnnnnnnnnnnnnnnnnnnnnnnnnnnnnnnnnnnnnnnnnnnnnnnnnnnnnnnnnnnnnnnnnnnnnnnnnnnnnnnnnnnnnnnnnnnnnnnnnnnnnnnnnnnnnnnnnnnnnnnnnnnnnnnnnnnnnnnnnnnnnnnnnnnnnnnnnnnnnnnnnnnnnnnnnnnnnnnnnnnnnnnnnnnnnnnnnnnnnnnnnnnnnnnnnnnnnnnnnnnnnnnnnnnnnnnnnnnnnnnnnnnnnnnnnnnnnnnnnnnnnnnnnnnnnnnnnnnnnnnnnnnnnnnnnnnnnnnnnnnnnnnnnnnnnnnnnnnnnnnnnnnnnnnnnnnnnnnnnnnnnnnnnnnnnnnnnnnnnnnnnnnnnnnnnnnnnnnnnnnnnnnnnnnnnnnnnnnnnnnnnnnnnnnnnnnnnnnnnnnnnnnnnnnnnnnnnnnnnnnnnnnnnnnnnnnnnnnnnnnnnnnnnnnnnnnnnnnnnnnnnnnnnnnnnnnnnnnnnnnnnnnnnnnnnnnnnnnnnnnnnnnnnnnnnnnnnnnnnnnnnnnnnnnnnnnnnnnnnnnnnnnnnnnnnnnnnnnnnnnnnnnnnnnnnnnnnnnnnnnnnnnnnnnnnnnnnnnnnnnnnnnnnnnnnnnnnnnnnnnnnnnnnnnnnnnnnnnnnnnnnnnnnnnnnnnnnnnnnnnnnnnnnnnnnnnnnnnnnnnnnnnnnnnnnnnnnnnnnnnnnnnnnnnnnnnnnnnnnnnnnnnnnnnnnnnnnnnnnnnnnnnnnnnnnnnnnnnnnnnnnnnnnnnnnnnnnnnnnnnnnnnnnnnnnnnnnnnnnnnnnnnnnnnnnnnnnnnnnnnnnnnnnnnnnnnnnnnnnnnnnnnnnnnnnnnnnnnnnnnnnnnnnnnnnnnnnnnnnnnnnnnnnnnnnnnnnnnnnnnnnnnnnnnnnnnnnnnnnnnnnnnnnnnnnnnnnnnnnnnnnnnnnnnnnnnnnnnnnnnnnnnnnnnnnnnnnnnnnnnnnnnnnnnnnnnnnnnnnnnnnnnnnnnnnnnnnnnnnnnnnnnnnnnnnnnnnnnnnnnnnnnnnnnnnnnnnnnnnnnnnnnnnnnnnnnnnnnnnnnnnnnnnnnnnnnnnnnnnnnnnnnnnnnnnnnnnnnnnnnnnnnnnnnnnnnnnnnnnnnnnnnnnnnnnnnnnnnnnnnnnnnnnnnnnnnnnnnnnnnnngtagaaaaggaaatatcttcgcataataacaggacagaatcattcccagaaactgcgttatgatgtgtgcgtttaactcacagagtgaaacctttcttttcatagagcagtttggaaacactctgtttgtaaagtctgcaagtggatatttggacctacttgaggccttcgttgcaaacgggattttttcatataatgctagacagaagaattctcagtaacctccttgtgttgtgtgtattcaactcacagagttgaaacttcctttagacagagcagatttgaaatactcttttcgtggaatgtgcaagtggagatttcaagcgctttgaggccaatagtagaaaaggaaatatcttcgtataaaacctagacagaatcattcccagaaacagcgttgtgatgtgtgcgttcaacatacagatttaacatttcttttcatagagcatttaggaaacactctgtttgtaaagtctgcaagtggatatttggacctccttgaggccttcgttggaaacgggatttcctcatataatgctagaccgaagaattctcagtaacttccttgtgttgtgtgtattccactgacaacagctgagcctacctttagacagagccgatttgaaacactctttttgtggaatttgcaagtggagatttcaagcgctttaagttcaatgctagaaaaggaaatatcttcgtatgaaaactagacagaatcattcccaaaaactgctttgtgatgtgtgcgtagaacacacagagtttaacctttcttttcatagagccctttggaaacactctgttggtcaaactggaagtcgatattctgatctctttgaggccttcgttggaaactggatttcttcatataatgctagacagaagaattctcagtaacttccttttgttgtgtgtactcaactcacagaggtgaacgttcctttagacacagcagatttgaaaccctctttttgtggaatttgcaagtggagatttcatgtgccttgaggccaaaggcagaaaaggaaatatcttagtagaaaaacaagacagaatcattctcagaaactgctttgtgatgtatgcattcaactcaaagagtttatccttacttttcgtacagcagtttggaaacactctgttggaaaagtctgcaaacggatattttgatctctttgaggccttctttggaaacgggttttattcatgtaaggctagacagaaaaattctcagtaacatctttgtgttgtgtgtattaagctgacagagttgacacttcctctagacagagcagatttgaaacactctttttgaggaatttgcaagtgtagatttcaaaccctttgaggtcaatggtagaaaaggaaatatcttcgtataaaaactaggcagaatgattctcagaaagtgctatgtgatgtgtgcgttcaactcaaagagttttaactttcttttcatagagcagttaggaaacactctgtttgtcaaatctgcaagtcgatattcggaactagttgaggccttctttggaaacgggatttcctcatataatgctagaaagaggaattcccagtaacttccttgtgttgtgtgtactcaactcacacaggtgaactttcctttagacagagaagatttgaaacactctttttgtggaatttcaattggagatttcaagtgctttgaggccaatggtagaaacgaaatatcttcgtataaaaacaagacaaaatcattcccagaaactgtgttgtgatgtgtgcgttcaactcacagagtttaacctttcttttcattgagcagtttggataaagtctgtttttaaagtctgcaagtgtatatttggacttcttagatgccttagttggaaacgggatttcttcatataatgctagagagaagaattcttagtaactcctttgtgttgtgtgcattcaactgacagaggtgaatcttccattagacagagcagatttgaaaaacgctttttgtggaatttgcaggtggagatttcaagcggtttaaggccaatggaagaaaaggaaatatcttagtataaaaactagacagaatcattctcagaaactgatctgtgatgtgtgctttcaactcacagtttaaattttcttttcattccgcagtttggaaacactctgtttgtaaagtctgcaagtggatattttgtcctctttgagaccttcgttggaaacgggtttttttcatgaaatgctagacagaagaattctcagtaacttccttgttttgtgtgtattcaactcacagagttgaacgttcctttagacacagcagatttgaaacactctttttgtggaatttgcaagtggagatttcaagcgctttttggtcaattgcagaaatggaaatatcttcgtttcaaaactagacagaatcattcccagaaactgcgttgtgatctgggcgttcaactcacagagtttcacctttcttttcattcagcaatttggaaacactctgtttgaaaagtcagcaagtggatatttggacctccttgaggagttccttggaaacgggatttcctcatttaaggctagacagaagaattttcagtaacttcctcgtgttgtgtgtattcaactgacagagttgaaccttccttcagacagagcagattagaaacactctttttgtggaatttgcaagtggagatttcaaacgctttgaggccaacggtagaaaaggaaatatcttcgtataaaaactacacagaatctttcccataaactgctttgtcatgtgtgcgttcaactcacagagtttaacctttctgctcatacagcagtttggaaacactctgtttgtaaagtctgcaagtggatattttgacctctttgacgccgtcgttggaaacgggatttcttcatataacgctagacagaagaattctaagtaagtcctttgtgttgtctgtgttcaactcacagatgtgtacgttcctttaggcagagcagacttgaaacactcttttttgtggaatttgcaagtggagatttcgagcgctttcaggtcaatgatagaaaaggaaatatcttcgtataaaaacaagacaaaatcattcccagaaactgcgtagtgatgtgtctgtttaactaacagagtttaacctttcttttcgtacagcattttggaaacactctgttggtaaagtctgcaagtggatatttggaccacttaggtgacttcgttggaaaagggatttcttcttacaatgctagagagaagaattcttagtaacttctttgtgttgtgtgtattcaactgacagagttgagcattcctttagacagagcagacttgaaacactctttttgtggaatttgcaattagaaatttcaagcgctttgaggccaaaggcagaagaggaaatatcttcgtataaaaacaagtcagaatcattctcagaaactgctttatcatgtgtgcgttcaactcacggagtttaacctaccttttcatacagcagtttgcaaacactctgtttgtaaagtctgcaagtagatatttggacatctttgaggccttcgttggaaacgggttttattcatgtaaggctagacagaagatttctcagtaacttctttgtgttgtgtgtattcaactgacagagttgacccttcttttagacagagcagatttgaaacactctttttgtggaatttgcaagtggagatttcagacgctttgaggtcaatggtagaaaaggaaatttcttcgtataaaaacttgacagaatgattctcagaaactgcttcgtgatgtatgcgttcaattcaaannnnnnnnnnnnnnnnnnnnnnnnnnnnnnnnnnnnnnnnnnnnnnnnnnnnnnnnnnnnnnnnnnnnnnnnnnnnnnnnnnnnnnnnnnnnnnnnnnnnatcatttccacaaactgcgttgtgatgtgttcgttcaactcacagagtttaacttttcttttcatagagcagttaggaaacactctgttggtaaattctgtaagtggatattctgacatcttgtggccttcgttggaaacgggatttcttcatattctgctagacagaagaattctcagtaacttccttgtgttgtgtttattcaactctgtgagttgaatgatcctttacacagagcagacttgaaacactctttttgtggaatttgcaagtggagatttcagccgctttgaggtcaatggtagaaaagtaaatatcttcgtataaagactagacagaatgattctcagaaactcctttgtgatgtgtgcgttcaactcacagagtttaacttttcttttaatagagcagttaggaaacactctgtttgtaaagtctgcaagtggatattcagacctctttgaggccttcgttggaaacgggatttcttcatattatgctagacagaagaattctcagtaaccttccttgtgttgtgtgtattcaactcacagagttgaacgatcctttacagagagcaggcttgaaacactctttttgtcgaatttgcaagtggagatttcagccgctttgaggtcaatggtagaataggaaatatcttcttatagaaactagacagaatgattctcataaactcctttgtgatgtgtgcgtccaactcacagagtttaacctttcttttcatagagcagttaagaaacactctgtttgtaaagtctgcaagtggatattcagacctccttgaggccttcgttggaaacggggtttcttcatattctgctagacagaagaattcccagtaactttcttgtgttgtgtgtgttcaactcacagagttgaactttcatttacacagagcagatttgaaacaccctttttgtggaatttgcaaatggagatttcaagcgctttgaggccaaaggcagaaaaggaaatatcttcgtataaaaactagacagaatcattctcagaaactgctctgcgatgtgtgcgttcaactctcagagtttaacttttcttttcattcagcagtttggaaacactctgtttgtaacgtctgcacgtgaataatttgaccacttagaggccttcgttggaaacgggtttttttcatgtaaggctagacagaagaattctcagtaacttcccttgtgttgtgtgtattcaactcacagaattgaacgatcctttacacagagcagacttgaaacactctttttgtggaatttgcaagtggagatttcagccgctttgaggtcaatggtagaataggaaatatcttcgtagaaaaactagacagaaatgattctcagaaacttctttgtgatatgtgcgttcaactcacagagtttaacctttcttttcatagagcagttaggaaacactctgtttgtaaactctgcaagtggatattcagacctctttgaggccttcgttggaaacgggatttcttcatactgtgctagacagaagaattctcagtaacttccttgtgttgtgtgtattcaactcacagagttgaacgatcctttacagagagcagacttgaaacactgtttttgtggaatttgcaagtggagatttcaagagctttggggccaaaggcagaaaaggaaatatcttcgtataaaaactagacagaaatcattctcagaaactgctctgcgatgtgtgcgttcaactctcagagtttaacttttcttttcattcagcagtttggaaacactctgtttctaaagtctgcacgtggatattttgaccacttagaggccttcgttggaaacgggtttttttcctgtaaggctagacagaagaattcccagtaacttccttgtgttgtgtgcattcaactcacagagttgaacgttcccttagacagagcacatttgaaacactctatttgtgcaatttgcaattgtagatttcaagcgctttaaggtcaatggcagaaaaggaaatatcttcgttttaaaactagacagaatcattcccacaaactgcgttgtgatgtgttcgttcaactcacagagtttaacctttctgttcatagagcagttaggaaacactctgtttgtaaagtctgcaagtggatattcagacctccttgaggccttctttggaaaagggatttcttcatattctgctagacagaagaattctcagtaacttccttgtgttgtgtgtattcaactcacagagttcaacgatcctttccacagagcagacttgaaacactctttttgtggaatttgcaagtggagatttcagcggctttgaggtcaatggtagaataggaaatatcttcctatagaaactagacagaatgactctcagaaacttctttgtgatgtgtgcgttcaactcacagaatttaacctttcttttcatagagcagttaggaaacactctgtttgtaaactctgcaagtggatattcagacctctttgaggccttcgttggaaacgggatttcttcatactatgctagacagaagaattctcagtaactttcttgtgttgtgtgtattcaactcacagagttgaatgatcctttacacagagcagacttgaaacactctttttgtggaatttgcaagtggagatttcagccgctttgagttcaatggtagaataggaaatatcttcctatagaaactagacagaatgattctcagaaactcctttgtgatgtgtgcgttcaactcacagagtttaacctttcttttcatagagcagttgggaaacactctgtttgtatagtctgcaagtggatattcagacctctttgaggccttcgttggaaacgggatttcttcatattctgctagacagaagaattcccagtaacttccttgtgttgtgtgtgttcaactcacagagttgaactttcatttacacagagcagatttgaaacactctttttgtggaatttgcaagtggagatttcaagcgctttgaggtcaaaggcagaaaaggaaatatcttcgtataaaaactagacagaaatctttctcagaaactgctctgggatgtgtgcgttcaactcacagagtttaacttttcttttcattcagcagtttggaaacactctgtttggaaagtctgcacgtggatattttgacctctttgaggccttcgttggaaacgggtttttttcatgtaaggctagacagaagaattcccagtaacttccttgtgttgtgtacattcaactcacagagttgaacgttcccttagacagagcagatttgaaacaccctttttgtgcaattggcaagtggagatttcaagcgctttaaggtcaatggcagaaaaggaaatatcttcgtttcaaaactagacagaatcattcccacaaactgcgttgtgatgtgttcgttcaactcacagagtttaacctttctgttcatagagcagttaggaaacactctgtttgtaaagtctgcaagtgcatattcagacctctttgaggccttcgttggaaacgttatttcttcatattatgctagacagaagaattctcagtaacttccttgtgttgtgtgtattcacctcacagagttgaacgatcctttacacagagcagacttgtaacactctttttgtggaatttgcaagtggagatttcagccgctttgaagtcaaaggtagaaaaggaaaaatcttcctataaaaactagacagaatgattctcagaaactcctttgtgatgtgtgcgttcaactcacagagtttaacctttcttttcatagagcagttaggaaacactctgtttgtaaagtctgcaagtggatattgagacctcttcgaggccttcgttggaaacgggtttttttcatataaggctagacagaagaattctcagtaacttccttgtgttgtgtgtattcaactcacagagttgaacgatcctttacacagagcagacttgtaacactctttttgtggaatttgcaagtggagatttcagccgctttgaagtcaaagttagaaaaggaaatatcttcctataaaacctagacagaatgattctcagaaactcctttgtgatgtgtgcgttcaacacacagagtttaacttttcttttcatagagcagttagtaaacactctgtttataaagtctgcaagtggatattcagacccctttgaggccttcgttggaaacgggatttcttcatattatgatagacagaagaattcccagtaacttccttgtgttgtgtgtgttcaactcacggagttgaactttgatttacacagagcagatttgaaacactctttttgtggaatttgcaagtggagatttcaagcgctttgaggccaaaggcaggaaagggaatatcttcgtataaaaactagacagaatcattctcagaaactgctctgtgatgtgtgcgttcaactctcagagtttaacttttcttttcattcagcagtttggaaacactctgtttgtaaagtctgtacgtggataatttgaccacttagaggccttcgttggaaacgggtttttttcatgtaaggctagacagaagaattctcagtaacttccttgtgttgtgtgcattcaactcacagagttgaacgatcctttacacagagcagacttgaaacactctttttgtggaatttgcaagtggagatttcagccgctttgagttcaatggtagaataggaaatatcttcctatagaaactagacagaatgattctcagaaactcctttgtgatgtgtgcgttcaactcacagagtttaacctttcttttcatagagcagttaggaaacactgtgtttgtaaagtctgcaagtggataatcagacctctttgaggccttcgttggaaacgggatttcttcatattctgcaagacagaggaattcttagtaacttctttgtattgtgtgtattcaactcacagagttgaaccttcttttagatagagtagatttgaaacacactttttgtggaattcccaattggagatttcaagcgctttggggccaatggtagaaaaggaaaaatcttcacataaaaactagacaaaatcattctcagaaactgctctgcgatgtgtgcgttcaactctcagagtttaacttttcttttcattcagcagtttggaaacactctgtttgtaaagtctgcacgtggatattttgaccacttagagggcttcgttggaaatgggtttttttcctgtaaggctagacacaagaattctcagtaacttccttgtgttgtgtgtattcaactcacagatttgaacgatcctttacacagagcagacttgaaacactctttttgtggaatttgcaagtggagatttcagccgctttgaggtcaatggtagaaaaggaaatatcttcgtatagaaacaagacagaatgattctcagaaaatcctttgtgatgtgtgcgttcaactcacagaatttaacttttcttttcatagagccgtttggaaacactctgtttgtaaagtctgcaagtggatattcagacctctttcaggccttcgttggaaacgggatttcttcatattatgctagacagaggaattcccagtaacttccttgtgttgtgtgtgttcaactcacagagttgaactttcatttacacagagcagatttgaaacactctttttgtggaatttgcaaatggagatttcaagcgctttgaggccaaaggaagaaaaggaaatatcttcgtttcaaaactagacagaatcattctcagaaactgctgcgtgatgtgtgcgttcaactctcagagtttcacttttcttttcattcagcggtttggaaacactctgtttgtaaagtctgcacgtggatattttgaccacttagacgccttcgttggaaacgggtttttttcatgtaaggctagacagaagaattcccagtaacttccttgtgttgtgtacattcaactcacagcgttgaacgttcccttagacagagcagatttgaaacactctttttgtgcaattggcaagtagtgatttcagccgctttgaggtcaatggtagaaaaggaaatatcttcgtataaaaactagacagaatcattcccacaaactgcgatgtgatgtgttcgttcaactcacagagtttaacctttctgttcatagagcagttaggaaacactctgtttgtaaagtctgtaagtggatattctgacatcttgtggccttcgttggaaacgggatttcttcatattctgctagacagaataattctcagtaacttccttgtgttgtgtgtattcaactgacagagttgaaggatcctttacagagagcaggcttgaaacactctttttgtcgaatttgcaagtggagatttcagccgctttgaggtcaatggtagaataggaaatatcttcttatagaaactagacaaaatgattctcagaaacttctttgtgatgtgtgcgttcaactcacagagtttaacctttcttttcatagagcaggtaggaaacactctgtttgtaaactctgcaagtggatattcagacctctttgaggccttcgttggaaacgggatttcttcatactatgctagacagaagaattctcagaatcttccttgtgttgtgtgtatccaactcacagagttgaacgatggtttacacagagcagatttgaaacactctttttgtggaatttgcaagtggagatttcagccgctttgaggtccatggtagaaaaggaaatatcttcgtataaaaactaaacagaatgattctcataaattcctttgtgatgtgtgcgttcaactcacaaagtttaacctttcttttcatagagcagttaggagacactctgtttgtaaagtctgcaagtggatattcagacctctttgaggccttcgttggaaacgggatttcttcatattatgctagacagaagatttctcagtaacttccttgtgttgtgtgtattcaactgacagagttgaactttcatttagagagagcagatttgaaacactctttttgtggaatttgcaagtggagatttcaagcgctttggggccaaaggcagaaaaggaaatatcttcgtataaaaactagacagaatcattctcataaactgctctgcgatgtgtgcgttcaactctccgagtttaacttttcttttcattcagcagtttggaaacactctgtttgtaaagtctgcacgtggataatttgaccacttagaggccttcgttggaaacggtttttttttcatgtaaggctagacagaagaattcccagtaacttccttgtgttgtgtgcattcagctcacagagttgaacgttcccttagagagagcagatttgaaacacactttttgtgcaattggcaagtggagatttcaagcgctataaggtcaatggcagaaaaggaaatatcttcgtttcaaaactagacagaatcattcccacaaactgcgttgtgatgtgttcgttcaactcacagagtttaacctttctgttcatagagcagttaggaaacactctgtttctaaagtctgaaagtgcatagtctgacatcttgtggccttcgttggaaacgggatttcttcatattctgctagacagaagaattctcagaatcttccttgtgttgtgtgtattcaactcacagagttgaacgatcctttacacagagcagacttgaaacactctttttgtggaatttgcaagtggagatttcagccgctttgaggtcgatggtagaaaaggaaatatcttcgtataaaaactagacagaatcattctcagaaactgctctgcgatgtgtgcgttcaactctcagagtttaacttttctttccattcagcagtttggaaacactctgtttgtaaagtctgcacgtggatattttgaccacttagaggccttcgttggaaacgggtttttttcatgtaaggctagacagaagaattctcagtaacttccttgtgttgtgtgtattcaactcccagagttgaacgatcctttacacagagcagacttgtaacactctttttgtggaatttgcaaatggagatttcagccgctttgaagtcaaaggtagaaaaggaaatatcttcctataaaaactagacagaatgattctcagaaactcctttgtgatgtgtgcgttcaactcacagagtttaacttttcttttcatagagcagttaggaaacactctgtttgtaaagtctgcaggtggatattcagacctctttgaggccttcgttggaaacgggatttcttcatattatgctaggcagaagaattctcagtaacttccttgtgttgtgtgtattcaactgacagagttgaactttcatttagagagagcagatttgaaacactgtttttgtggaatttgcaagtggagatttcaagcgctgtggggccaaaggcagaaaaggaaatatcttcgtataaaaactagacataatcattctcagaatctgctctgtgatgtgtgcgttcaactctcagagtttaacttttcttttcattcagcagtttggaaacactctgtttgtaaagtctgcacgtggataattagaccacttagaggccttcgttggaaacgggtttttttcatgtaaggctatacagaagaattcccagtaacttccttgtgttgtgtacattcaactcacagagttgaacgttcccttagacagagcagatttgaaacactctttttgtgcaattgggaagtggagatttcaagcgctttaaggtcaatagcagaaaaggaaatatcttcgtttcaaaactagacagaatcattcccacaaactgcgttgtgatgtgttcgttcaactcacagagtttaacctttctgttcatagagcagttaggaaacactctgtttgttaagtctgtaagtggatattctgacatcttgtggccttcgttggaaacgggatttcttcatattctgctagacagaagaattcccagtaacttccttgtgttgtgtgtgttcaactcacagagttgaactttcatttacacagagcagatttgaaacactctttttgtggtatttgcaaatggagatttcagccgcgttgaggtcaatggtagaaaaggaaatatcttcgtttcaaaactagacagaacgattctcagaaactcctttgtgatgtgtgcgttcaactcacagagtttaacctttcttttcatagagcagttaggaaacactctgtttgtaaagtctgcaagtggatattcagacctccttgaggccttcgttggaaacgggatttcttcatattctggtagacagaagaattctcagtaacttccttgtgttgtgtttattcaactcacagagttgaatgatcctttacacagagcagacttgaaacactctttttggggaatttgcaagtggagatttcagccgctttgaggtcaatggtagaaaagtaaatatcttcgtataaagactagacagaatcattctcagaaactgctgcgtgatgtgtgcgttcaactctcagagtttaacttttcttttcattcagcggtttgtaaacactctgtttgtaaagtctgcacgtggatattttgaccacttagaggccttcgttggaaacgggttttttgcatgtgaggctagacagaagaattcccagtaacttccttgtgttgtgtgcattcaactcacagagttgaacgttcccttagacagagcagatttgaaacactctatttgtgcaatttgcaagtgtagttttcaagctctttaagatcaacggcagaaaaggaaatatcttcgtttcaaaactagacagaatcattcccacaaactgcgttgtgatgtgttcgttcaactcacagagtttaacttttccgttcatagagcagttaggaaacactctgtttgtaaagtctgcaagtggatattcagacctccttgaggccttcgttggaaacgggatttcttcatattctgctagacagaagaatgctcagtaacttccttgtgttgtgtttattcaactcacagagttgaacgatcctttacacagagcagacttgaaacactctttttgtggaatttgcaagtggagatttcagccgctttgaggtcaatggtagaaaaggaaactatcttcatataaagattagacagaatgattctcagaaactcctttgtgatgtgtgtgttcaactcacagagtttaacctttcttttcatagagcagttagtaaacactctgtttataaagtctgcaagtagatattcagacccctttgaggccttcgtcggaaacgggatttcttcatattatgctagacagaagaattctcagtaacttccttctgttgcgtgtattcaactcacagagttgaacgatcctttacacagagcagacttgaaacactctttttgtggaatttgcaagtggagatttcagccgctttgaggtcaatggtagaataggaaatatcttcctatagaaactagacagaatgattctcagaaactcctttgtgatgtgtgcattcaactcacagagtttaacctttcttttcatagagcagttaggaaacactctgtttctaaagtctgcaagtggatattcagacatctttggggccttcgttggaaacgggatttcttcatgttctgctagacagaagaattctcagtaactttccttgtgttgtgtgtgttcaactcacagagttgaacgatcctttacacagagcagacttgtcacactctttttgtggaatttgcaagtggagatttcagccgctttgaagtcaaaggtagaaaaggaaatatcttcctataaaaactagacagaatgattctcagaaactcctttgtgatgtgtgtgttcaactcacagagttcaacctttcttttcatagagcagttagtaaacactctgtttataaagtctgcaagtggatattcagacccctttgaggccttcgttggaaacgggatttcttcttattatgctagacagaagaattctcagaatcttccttgtgttgtgtgtattcaactcacagatttgaacgatggtttacacagagcagatttgaaacactctttttgtggaatttgcaagtggagatttcagccgctttgaggtcaatggtagaaaaggaaatatcttcgtataaaaactagacagaacgatcctcagaaactcctttgtgatgtgtgcgttcaactcacagagtttaacttttcttttcatagagccgttaggaaacactctgtttgtaaagtctgcaagtggatattcagacctctttgaggccttcgttggaaacgggatttcttcctattctgctagacagaagaattctcagaaacttcccctgtgttgtgtgaattcaactcacagagttgaacgatcctttacacagagcagacttgaaacactctttttgtggaatttgcaagtggagatttcagccgctttgaggtcaatggtagaatagggaatatcttcctatagaaactagacagaatgattctgagaaactcctttgtgatgtgtgcgttcaactcacagagttcaacctttcttttcctagagcagttgggaaacactctgtttgtaaagtctgcaagtggatattcagacttctttgaggccttcgttggaagcgggatttcttcatattctgccatacagaagaattctcagtaacttcattgtgttgtctgtattcaactcacagagttcaacgatcctttacacagagcagacttgaaacactctttttctggaatttgcaagtggagatttcagccgctttgaggtcaatggtagaaaaagaaatatcttcctataaaaactagacagaatcattcccacaaactgcgttgtgatgtgttcgttcaactcacagagtttaacctttctgttcatagagcagttaggaaacactctgtttgtaaagtctgtaagtggatattctgacatcctgtggccttcgttggaaacgggatttcttcatattctgctagacagaagaattctcagtaacttccttgtgttgtgtgtattcaactcacagagttgaacaatcctttacacagagcggacttgaaacactctttttgtggaatttgcaagtggagattttagccgatttgaggtcaatggtagaataggaaatatcttcctatagaaactagacagaatgattctcagaaactcctttgtgatgtgtgcgttcaactcacagagtttaacctttcttttcatagagcagttaggaaacactctgtttgtaaagtctgtaagtggatattcagacctctttgaggccttcgttggaaacgggatttcttcatattgtgctagacacaagaattctcagtaacttccttgtgttgtgtggattcaactcacagagttgaacgatcctttacacagagcagacttgaaacactctttttgtggaatttgcaagtggagatttcagccgctttgggttcaatggtagaataggaaatatcttcctatagaaactagacagaatcattcccacaaactgcgttgtgatgggttcgttcaactcacagagtttaacctttccgttcatagagcagttaggaaacacactgtttgtaaagtctgtaagtggatattctgacatcttgtggccttcgttggaaacgggatttcttcatattctgctagacagaagaattctcagtaactttccttgtgttgtgtgtattcaactcacagagttgaacgatcctttacagagagcagacttgaaacactctttttgtggaatttgcaagtggagatttcagccactttgaggtcaatggtagaaaaggaaatatcttcgtataaagactagacagattgattctcagaaactcctttttgatgtgtgtcttcaactcacagagtttaaactttcttttcatagagcagttaggaaacactctgtttgtatactctgcaagtggatattcagacctctttgaggccttctttggaaaagggatttcttcatattgtgctagacagaagaattctcagtaactttccttgtgttgtgtgtattcaactcacagagttgaacgatcctttacacagagcggacttgaaacactctttttgtggaatttgcaagtggagatttaagccgcgttgaggtcaatggtagaaaaggaaatatcttcgtataaaaactagacagaatgattctccgaaactcctttgtgatgtgtgcgttcaactcacagagtttaacctttctgttcatagagctgttaggaaacactctgtttgtaaagtctgcaagtggatattcagacctccttgaggccttcgttggaaacgggatttcttcatattctgctagacagaagaattctcagtaacttccttgtgttgtgtgtattcaactcacagagttgaactgatcctttacacagagcagacttgaaacactctttttgtggaatttgcaagtggagatttcagccgctttgaggtcagtagtagaaaaggaaatatcttcgtagaaaaactagacagaatgattctcagaaactcctttgtgatgtgggcgttcaactcacagagtttaacctttcttttcatagagcagttaggaaacactctgtttgtaaagtctgcaagtggatacttggacttctttgaggccttcgttggaaacgggtttttttcatgtaaggctagacagatgaattctcagtaacttccttgtgttgtgtgtattcaactcacagagttgaacgatcctttacacagagcagatttgaaacactgtttttctggaatttgcaagtggagatttcagccgctttgaggtcaatggtagaaaaggaaatatcttcgtataaaaactagacagaatgattctcagaaactcctttgtgatgtgtgcgttcaactcacagagtttaacctttcttttcatagagcagttaggaaacactctgtttgtaaagtctgcaagtggatattcagacatctttgaggctttcgttggaaacgggatttcttcatattctgctagacagcagaattctcagtaacttccttgtgttgtgtgtattcaactaacagagttgaacgatcctttacacagagcagacttgaaacactctttttgtggaatttgcaagtggagatttcagccgctttgagttcaatggtagaataggaaatatcttcctatagaaactagacagaatgattctcagaaaatcctttttgatgtgtgcgttcaactcacagagtttaacttttcttttcatagagcagttaggaaacactctgtttgtaaagtctgcaagtggatattcagacctctttgaggccttcgttggaaacgttatttcttcatattatgctagacagaagaattctcagtaactgccttgtgttgtgtgtattcaactcacagagttgaacgatcctttacacagagcagacttgaaacactccttttgtggaatttgcaagtggagatttcagccgctttgaagtcaatggtagaataggaaatatcttcctatagaaactagacagaatgattctcataaactcctttgtgatgtgtgcgttcaactcacagagtttaacctttcttttcatagagcatttaggaaacactctgtttgtaaagtctgcaagtggatattcagacctctttgaggccttcgttgaaaacgggatttcttcatattctgctagacagaagaattctcagaaacttccttgtgttgtgtgttttcaactcacagagttgaacgatcctttacacagagcagacttgaaacactccttttgtggaatttgcaagtggagatttcagccgctttgaggtcaatggtagaataggaaatatcttcctatagaaggtagacagaatgattctcataaactcctttgtgatgtgtgcgttcaactcacagagtttaacctttcttttcatagagcagttaggaaacactctgtttgtaaagtatgcaagtggatattcagacctctttgaggccttcgttggaaacgggatttcttcatattatgctagacagaagaattctcagtaacttccttgtgttgtgtgtattcaactcacagagttgaacgatcctttacacagagcagacttgaaacactctttttgtgaaatttgcaagtggagatttcagccgctttgaggtcaatggtagaaaagggaatatcttcgtatagaaactagacagaatgattctcagaaactcctttgtgatgtgtgcgttcgactcacagagttgaacctttcttttaatagagcagttgggaaacactctgtttgtaaagtctgcaagtggatattcagacttctttgaggccttcgttggaagcgggatttcttcatattctgctagacagaagaattctcagtaacttccttgtgttgtgtgtattcaactgacagagttgaacgatcctttacacagagcagacttgaaacactctttttggggaatttgcaagtggagatttcagccgctatggggtcaatggtagaataggaaatatcttcctatagaaactagacagaatgattctcagaaactcctttgtgatgtgtgcgttcaattcacagagtttaacttttcttttcatagagcagttaggaaacactctgtttgtaaagtctgcaagtgaatattcagacctctttgaggccttcgttggaaacgggatttcttcatattatgctagacagaagaattctcagtaacttccttgtgttgtgtgtattcaattcacagagttgaacgatcctttacagagagcaggcttgaaacactctttttgtggaatttgcaagtggagatttcatccgctttgaggtcaatggtagaataggaaatatcttcctatagaaacttgacagaatgattctcagaaactcctttgtgatgtgtgcgttcaactcacagagttcaacctttcttttcctagagcagttgggaaacactctgtttgtaaagtctgcaagtggatattcagacatccttgaggctttcgttggaaacgggatttcttcatattctgctatacagaagaattctcagaaacttcctggtgttgtgtgttttcaactcacagagttcaacgatcctttacacagagtagacttgaaacactcttttcgtggaattggcaagtggagatttcagccgctttgaggtcaatggtagaaaaggaaatatcttcgtataaaaactagacagaatgattctcagaaactcctttgtgatgtgtgcgttcaactcacagagtttaacctttcttttcatagagcagttaggaaacactctgtttgtaaactctgcaagtggatatacagacctctttgaggccttcgttggaaacgggatttcttcatactatgctagacagaagaattctcagtaacttccttgtgttgtgtgtattcaactcacagagttgaacgatcctttacacagagcagacttgatacattctttttgtggaatttgcaagtggagatttcagccgctttgaggtcaatggtagaataggaaatatcttcctatagaaactagacagaatgattctcagaaactcctttgtgatgtgtgcgttcaactcacagagtttaacctttcttttcatagagcagttagggaacactctgtttgtaaagtctgcaagtggatattcagacctctttgaggccttcgtaggaaacgggatttcttcatattatgctagacagaagaattctcagtaacttccttgtgttgtgtgtattcaactcacagagttgaacgatcctttacagagagcagacttgaaacactctttttgtggaatttgcaagtggagatttcagccgctttgaggtcaattgtagaaaaggaaatatcttcgtataaagactagacagaatgattctcagaaacttcattgtgatgtgtgcgttcaactcacggagtttaacctttcttttcatagagcagttaggaaacactctgtttgtaaactctgcaagtggatattcagacctctttgaggccttcgttggaaacgggatttcttcatactatgctagacagaagaattctcagtaacttccttgtgttgtgtgtattcaactcacagagttgaacgatcctttacacagagcagacttgaaacactctttttgtggaatttgcaaatggagatttcaagcgctttgaggccaaaggcagaaaaggaaatatcttcgtataaaaactagacagaatgattctcagaaactcctttgtgatgtgtgcgttcaactcacagagtttaacctttcttttcatagagcagttagcaaacactctgtttgtaaagtctgcaagtggatattcagacctctttgaggccttcgttggaaacgggatttcttcatattatgctagacagaagaattctcagtaacctccttgtgttgtgtgtattcaactcacagagttgaacgatggtttacacagagcagaattgaaacactctttttgtggaatttgcaagtggagatttcagccgctttgaggacaatggtagaaaaggaaatatcttcgtataaaaactagacagaatgattctcagaaactcctttgtgatgtgtgcgttcaactcacagagtttaacctttctgttcatagagcaattgggaaacactctgtttgtaaagtctgcaagtggatattcagacctctttgaggccttcgttggaaacgggatttcttcatattctgctagacagaagaattctcagtaacttccttgtgttgtgtgtattcaactcacagagttgaatgatcctttacacagaacagacttgaaacactctttttgtggaatttgcaagtggagatttcagccgctttgaggtcgacggtagaataggaaatatcttcctatagaaactagacagaatgattctcagaaacttcattgtgatttgtgcgttcaactcacagaactttaacctttcttttcatagagcagttaggaaacactctgtttgtaaagtctgcaagtggatattcagacctctttgaggccctcgttggaaactggtttttttcatgtaaggctagacagtagaattctcagaaacttccttgtgttgtgtgttttcaactcccagagttgaacgatgccttacacagagtagacttgaaaaactctttttgtggaatttgcaagtggagatttcaggcgctttgaggtcaatagtagaaaaggaaatatcttcgtataaaaactagacagaatgattctcagaaactcctttgtgatgtgtgtgttcaactcacagagtttaacctttcttttcatagagcagttaggaaacactctgtttgtaaagtctgcaagtggatattcagacctcttcgaggccttcgttggaaacgggtttttttcatataaggctagacagaagaattctcagtaacttccttgtgttgtgtgtattcaactcacagagttgaacgatcctttacacagagcatacttgaaacactcttcttgtggaatttgcaagtggagatttcagccgctttgaggtccatggtagaataggaaatatcttcctatagaaactagacagaatgattctcagaaactcctttgtgatgtgtgcgttcaactcacacagtttaacctttcttttcatagagcagttaggaaacactctgtttgtaaagtctgcaagtggatattcagacctccttgaggtcttcgttggaaacgggatttcttcatattttgctagacagaagaattctcagaaacttccttgtgttgtgtgttttcaactcacagagttcaacgatgctttacacagagtagacttgacacactctttttgtggaatttgcaagaggagatttcagccgctttgaggtcaatggtagaaaaggaaatatcttcgtataaaaactagacagaatgattctcagaaactcctttgtgatgtgtgcgttcaactcacagagttcaacctttcttttcatagagcagttgggaaacactctgtttgtaaagtctgcaagtggatattcagacttctttgaggccttcggtggaagcgggatttcttcatattctgctagacagaagaattctcagtaacttccttgtgttgtgtgtatgcaactcacagagttgaacgatcctttacacagagcagacttgtaacactctttttgtggaatttgcaagtggagatttcagccgctttgaagtcaaaggtagaaaaggaaatatcttcctataaaaactagacagaatgattctcatgaactcctttgtgatgtgtgcgttcaactcacagagtttaacctttcttttcatagagcagttaggaaacactctgtttgtaaagtctgcaagtggatattcagacctccttgaggccttcgttggaaacggtatttcttcatattctgctagacagaagaattctcagtagcttccttgtgttgtgtttattcaactcacagagttgaatgatcctttacacagagcagacttgaaacactctttttgtggaatttgcaagtggagatttcagccgctttgaggtcaatggtagaaaagtaaatatcttcgtataaagactagacagaatgattctcagaaacttcattgtgatgtgtgcgttcaactcacagagtttatcctttcttttcatagagcagttaggaaacactctgtttgtaaactctgcaagtggatattcagacctctttgaggccttcgttggaaacgggatttcttcatactgtgctagacagaagaattctcagtaacttccttgtgttgtgtgtattcaactcacagagttgaacgatcctttacacagagcggacttgaaacactcgttttgtggaatttgcaagtggagatttcagccgtgttgagataaatggtagaaaaggaaatatcttcgtataaaaactagacagaatgattctcagaaactcttttgtgatgtgtgcgttcaactcacagagtttaacctttcttttcatagagcagttaggaaacactctgtttgtaaagtctgcaagtggatattcagacctccttgaggccttcgttggaaacgggatttcttcatattctgctagacagaagaattctcagtaacttccttgtgttgtgtgtattcaactcacagagttgaacgaccctttacacagagcggacttgaaacactctttttgtggaatttgcaagtggagatttcagccgcgttgaggtcaatggtagaaaaggaaatatcttcgtacaaaaactagacagaatcattcccacaaactgcattgtgatgtgttcgttcaactcacagagtttaacctttcttttcatagagcagttaggaaacagtctgtttgaaaattctgtaagtggatattctgacatcttgtggccttcgttggaaacgggatttcttcatattctgctagacagaagaattctcagaatcttccttgtgttgtgtgtattcaactcacagagttgaacgatggtttacacagagcagatttgaaacactcatttggtggaatttgcaagtggagatttcagccgctttgaggtcaatggtagaaaaggaaataccttcgtataacaactagacagaatgattctcataaacttctttgtgatgtgtgcattcaactcacagagtttcacctttcttttcatagagcagttaggaaacactctgtttgtaaagtctgcaagtggatattcagacctccttgaggtcttcgttggaaacgggatttcttcatattctgctagatagaagaattctcagtaacttcccttgtgttgtgtgtattcaactcacggagttgaacgatcgtttacacagagcagacttgaaacactctttttgtggaatttgcaagtggagatttcagccgcgttgaggtcaatggtagaaaaggaaatatcttcgtataaaaactagacagaatgattctgagaaactcctttgtgatgtgtgcgttgaactcacagagtttatcttttcttttcatagagcagttaggaaacactctgtttgtaaagtctgcaagtggatattcagacctccttgaggccttcgttggaaacgggatttcttcatattatgctagacagaataattctcagtaacttccttgtgttgtgtgtattcaactcacagagttgaacgatcctttacacagagcagacttgaaacaatctttttgtggaatttgcaagtggagatttcagccgctttgaggtcaatggtagaataggaaatatcttcctatagaaactagacagaatgattctcagaaactcctttgtgatgtgtgcgttcaactcacagagttcaacctttcttttcatagagcagttgggaaacactctgtttgtaaagtctgcaagtggatattcagacttctttgaggccttcgttggaagcgggatttcttcaaattctgctagacagaagaattctcagaaacttccttgtgttgtgtgtattcaactcacagagttgaacgatcgtttacacagagcagacttgaaacactctttttgtggaatttgcaagtggagatttcagccgctttgaggtcaatggtagaataggaaatatcttcctatagaaactagacagaatgattctcagaaactcctttgtgatgtgtgcgttcaactcacagagtttaacctttcttttcatagagcagttaggaaacactctgtttgtaaagtctgcaagtggatattcagacctccttgaggccttctttggaaacaggatttcttcatattctgctagaaagaagaattctcagtaacttccttgtgttgtgtgtattcaactcacagagctgaacgatcctttacacagagcagacttgtaacactctttttgtggaatttgcaagtggagatttcagccgctttgaagtcaaaggtagaaaaggaaatatcttcctataaaaactagacagaatgattctcagaaactcatttgtgatgtgtgtgttcaactcacagagtttaacctttcttttcatagagcagttagtaaacactctgtttataaagtctgcaagtggatattcagacccctttgaggccttcgttggaaacggcatttcttcatattatgctagacagaagaattctcagaaacttcccttgtgttgtgtttattcaactcacagagtcgaacgatcctttactcagagcagacttgaaacactccatttgtggaatttgcaagtggagatttcagccgctttgaggtcaatggtagaataggaaatatcttcctatggaaactagacagaatgattctaagaaactcctttgagatgtgtgcgttcaactcacagagtttaacctttcttttcatagagcagttaggaaacactctgtttgtaaagtctgcaagtggatattcagacctctttgaggccttccttggaaacgggatttcttcatattatgctagacagaagaattctcagtaacttccttgtgttgtgtgtattcaactgacagagttgaactttcatttagagagagcagatttgaaacactgtttttgtggaatttgcaagtggagatttcaagcgctttggggccaaaggcagaaaaggaaataccttcgtataaaaactagacagaatcattctcagcaaactgctctgtgatgtgtgcgttcaactctcagagtttaacttttcttttcattcagcagtttggaaacactctgtttgtaaagtctgcacgtggataatttgaccacttagaggccttcgttggaaacgggtttttttcatgtaaggctagacagaagaattcccagtaacttccttgtgttgcgtgcattcaactcacagagttgaactttcccttagacagagcagatttgaaacactctatttgtgcaatttgcaagtgtagatttcaagcgctttaaggtcaatggcagaaaaggaaatatcttcgtttcaaaactagacagaatcattcccacaaactgcgttgtgatgtgttcgttcaactcacagagtttaacctttctgttcatagagcagttaggaaacactctgtttgtaaagtctgcaagtggatattcagacctccttgaggccttcgttggaaacgggatttcttcattttctgctagacagaagaattctcagtaacttccttgtgttgtgtgtattcaactcacagagttgaaggatcctttacagagagcaggcttgaaacactctttttgtcgaatttgcaagtggagatttcagccgctttgaggtcaatagtagaaaaggaaatatcttcgtagaaaaactagacagaatgattctcagaaactcctttgtgatgtgtgcgttcaactcacagagtttaaactttcttttcatagagcagttgggaaacactctgtttgtaaagtctgcaagtggatattcagacatccttgaggctttcgttggaaacgggatttcttcatattctgctagaaagaagagttcccactaacttccatgtgttgtgtgtgttcaactcacagagttgaactttcatttacacagagcagatttgaaacactctttttgtggaatttgcaaatggagatttcaagcggtttgaggccaaaggcagaaaaggaaatatcttcgtataaaaactagacagaatcattctgagaaactgctctgcgatgtgtgcgttcaactctcagagtttaacttttcttttcattcagcagtttggaaacactctgtttgtaaagtctgcacgtggataatttgaccacttagaggccttcgttggaaacgggtttttttcatgtaaggctagacagaagaattctcagtaacttccttgtgttgtgtgtattcaactcacacagttgaacgatcctttacacagagcagacttgtaacactctttttgtggaatttgaaagtggagatttcagccgctttgaagtcaaaggtagaaaaggaaatatcttcctataaaaactagacagaatgattctcagaaactcctttgtgatgtgtgcgttcaactcacagagtttaacctttcttttcatagagcagttaggaaacactctgtttgtaaagtctgcaagtggatattcagacctctttgaggccttcgttggaaacgggtttttttcatataaggcttgacagaagaattctcagtaacttccttgtgttgtgtgtattcaagtgacagagttgaacgatcctttacacagagcagacttgaaacactctttttgtggaatttgcaaggggagatttcaagcgctttggggccaaaggcagaaaaggaaatatcttcgtataaaaactagacagaatcattctcagaaactgctctgcgatgtgtgcgttcaactctcagggtttaacttttcttttcattcagcagtttggaagcactctgtttgtaaagtctgcaagtggatattttgacctctttgaggccttcgttggaaacgggtttttttcatgtaagtctagacagaagaattcccagtaacttccttgtgttgtgtgcattcaactcacagagttgaacgttcccttagacacagcagatttgaaacactctatttgtgcaatgtgcaagtgtagatttcaagcgctttaaggtcaatggcagaaaaggaaatatcttcgtttcaaaactagacagaatcattcccacaaactgcgttgtgatgtgttcgttcaactcacagagttttacctttctgttcatagagcagttaggaaacactctgtttgtaaagtctgtaagtggatattctgacatccttgtggccttcgttggaaaagggatttcttcatattctgctagacagaagaattctcagtaacttccttgtgttgtgtgtattcaactcacagagttgaacgatcctttacacagagcagacttgaaacgttctttttgtggaatttgcaagtggagatttcagccgctttgaggtcaatcgtagaataggaaatatcttcctatagaaactagacagaatgattctcagaaactcctttgtgatgtgtgcgttcaactcacagagtttaacctttcttttcatagagcagttaggaaacactctgtttgtaaagtctgcaagtggatattcagacatccttgaggctttcgttggaaacgggatttattcatattctgctagacagaagaattctcagtaacttccttgtgttgtgtgtgttcaactcacagagttgaactttcatttacacagagcagatttgaaacactctttttgtggaatttgcaagtggagatttcagccgctttgaagtcaaatgtagaaaaggaaatatcttcctataaaaactagacagaatgattctcagaaactcctttgtgatgtgtgcgttgaactcacagagtttaaccttccttttcatagagcagttaggaaacactctgtttgtaaagtctgcaagtggatattcagacctctttgaggccttcgttggaaacgggtttttttcatataaggctagacagaagaattcccagtaacttccttgtgttgtgtgtgttcaactcacagagttgaactttcatttacagagagcagatttgaaacactctttttgtggaatttgcaagtggagatttcaagcgctttgaggccaacggcagaaaaggaaatatcttcgtataaaaactagacagaatgattctcagaaacttctttgtgatgtgtgcgttcaactcacagagtttaacctttcttttcatagagcagttaggaaacactctgtttgtaaactctgcaagtggatagtcagacctctttgaggccttcgttggaaacgggatttcttcatactatgctagacagaagaattctcattaacttccttgtgttgtgtgtattcaactcacagagttgaacgatcctttacacagagcggacttgaaacacactttttgtggaatttgcaagtggagatttcagccgcgttgaggtcaatggtagaaaaggaaatatcttcgtataaaaactagacagaatgattctcagaaaatcctttgtgatgtgtgcgttcaactcacagagtttaacttttcctttcatagagcagttaggaaacactctgtttgtaaagtctgcaagtggatattcagacctctttgaggccttcgttggaaacgggatttcttcatattatgctagacagaagaattctcagaaacttccttgtgttgtgtgtattcaactcacagagttgaacgatcctttacacagagcagacttctaacacactttttgtggaatttgcaagtggagatttcagccgctttgaggtcaatggtagaaaaggaaatatcttcgtataaaaactagacagaatgattctcagaaactcctttgtgatgtgtgcgttgaactcacagagtttaacttttcttttcattcagcagtttggatacactctgtttgtaaagtctgcacgtggatattttgagcacttagaggccttcgttggaaacgggtttttttcatgtaaggctaggcagaagaattcccagtaacttccttgtgttgtgtgaattcaactcacagtgttgaacgttcccttagacagagcatatttgaaacactctatttgtgcaatttgcaagtgtagatttcaagcgctttaaggtcaatggcagaaaaggaaatatcttcgtttcaaaactagacagaatcattcccacaaactgcgttgtgatgtgttcgttcaactcacagagtttaacctttctgttcatagagcatttaggaaacactctgtttgtaaagtctgtaagtggatattctgacatcttgtggccttcgttggaaacgggatttcttcatattctgctagacagaagaattctcagtaactttccttgtgttgtgtgtattcaactcacagagttgaacgatcctttacacagagcagacttgaaacactctttttgtggaatttgcaagtggagatttcagccgcgttgaggtcaatgttagaaaaggaaatatcttcgtataaaaactagacagaatgattctcagaaactcctttgtgatgtgtgcgttcaactcacagagtttaacctttcttttcatagagcagttaggaaacactctgtttgtaaactctgcaagtggatattcagacctctttgaggccttcgttggaaacgggatttctccatactgtgctagacagaagaattctcagtaacttccttgtgttgtgtgtattcaactcacagagttgaacgatcctttacacagagcagacttgaaacactctttttgtggaatttgcaggtggagatttcagccgctttgaggtcaatggtagaaaaggaaatatcttcgtataaagactagacagaatgattctcagaaactcctttgtgatgtgtgcgttcagctcacagagtttaacgtttcttttcatagagcagttaggaaacactctgtttgtaaagtctgcaagtggatattcagacctctttgaggccttcgttggaaacgggtttttttcatataaggctagacagaagaattcccagtaacttcccttgtgttgtgtgtgttcaacacacagagttgaactttcatttacacagagcagatttgaaacactctttttgtggaatttgcaagtggagatttcaagcgctttgaggccaaaggcagaaaaggaaatatcttcgtttcaaaactagacagaatcattctcagaaactgctgcgtgatgtgtgcgttcaactctcagactttaacttttcttttcattcagcggtttggaaacactctttttgtaaagtctgcacgtggatattttgaccacttagaggccttcgttggaaacgggtttttttcatgtaaggctagacagaagaattcccagtaacttccttgtgttgtgtgcattcaactcaccaatttgaacgttcccttagacagagcagatttgaaacactctatttgtgcaatttgcaattgtagatttcaagccctttaaggtcaacggcagaaaaggaaatatcttcgtttcaaaactagacagaatcattcccacaaactgcgttgtgatgtgttcgtttaactcacagagtttaacctttcttttcatagagcagttaggaaacagtctgtttgtaaattctgtaagtggatattctgacatcttgtggccttcgttggaaacgggatttcttcatattctgctagacagaagaattctcagaaacttcgttgtgttgtgtgttttcaactcacagagttcaacgatcctttacacagagtagacttgaaacactctttttgtggaattggcagggtggagatttcagccgctttgaggtcaatggtagaaaaggagatatcttcgtataaaaactagacagaatgattctcagaaactcctttgtgatgtgtgctttcaacgcacagagtttaacctttcttttcatagagcagttaggaaacactctgttggtaaagtctgcaagtggatattcagacctccttgaggccttcgttggaaacgggatttcttcctattatgctagacagaagaattctgagtatcttccttgtgttgtgtgtattcaactcacagagttgaacgatcctttacacagagcagacttgaaacactctttttgtggaatttgcaagtggagatttcagccgctttgaggtcaatggtagaaaagggaatatcttcgtatagaaactagacagaattattctcagaaactcctttgtgatgtgtgcgttcaactcacagagtttaacctttcttttcatagagcagttaggaaacactctgtttgtaaagtctgcaagtggatattcagacatctttgaggctttcgttggaaacgggatttcttcatattctgctagacagaagaattcccagtaacttccttgtgttgtgtgtgttcaactcacagagttgaactttcatttacacagagcagatttgaaacactctttttgttgaatttgcaagtggagatttcaagcggtttgaggccaaaggtagaaaaggaaatatcttcgtttcaaaactagacagaatcattctcagaaactgctctgcgatgtgtgcgttgaactctcagagtttaacttttcttttcattcagcagtttggaaacactctgtttgtaaagtctgcacgtggatattttgaccacttagaggccttcgttggaaacgggtttttttcctataaggctagacagaagaattcccagtaacttccttgtgttgtgtgcattcaactcacagagatgaacgttcccttagacagagcagatttgaaacactctatttgtgcaatttgcaagtgtagatttcaagcgctttaaggtcaaaggcagaaaagaaaatatcttcgtttcaaaactagacagaatcattcccacaaactgcgttgtgatgtgttcgttgaactcacagagtttaacctttctgttcatagagcagttaggaaacactctgtttgtaaagtctgtaagtggatattctgacctcttgtggccttcgttggaaacgggatttcttcatattctgctagacagaagaattctcagtaacttccttgtgttgtgtgtattcaactcacagagttgaacgatcccttacacagagcagacttgaaacactctttttgtggaatttgcaagtggagatttcagccgctttgaggtcaatggtagaaaaggaattatcttcgtataaagactagacagaatgattctcagaaacttctttgtgatgtgtgcgttcaactcacagagtttaacctttcttttcatagagcagttaggaaacactctgtatgtaaactctgcaagtggatattcagacctgtttgaggccttcgttggaaacgggatttcttcatactatgctagacagaagaattctcagtaacttccttgtgttgtgtgtattcaactcacagagttgaacgatcctttacacagagcagacttgaaacactctttttgtggagtttgcaattggcgatttcagccgctttgaggtcaatggtagaataggaaatatcttcctatagaaactagacagaatgattctcagaaactcctttgtgatgtgtgcgttcaactcacaaagtttaacctttcttttcatagagcaattaggaaacactctgtttttaaagtctgcaagtggatattcagacctcttagcggccttcgttggaaacgggatttcttcatattatgctagacaaaagaattctcagtaacttccttgtgttgtgtgtattcaactgacagagttgaactttcatttagagagagcagttttgtaacactgtttttgtggaatttgcaagtggagatttcaagcgctttggggccaaaggcagaaaaggaaatatcttcgaataaaaactagacagaatcattctcagaaactgctctgcgatgtgtgcgttcaactctcagagtttaacttttcttttcattcagcagtttggaaacactctgtttgtaaagtctgcacgtggataatttgactacttagaggccttcgttggaaacgggtttttttcatgtaaggctagacagaagaattctcagtaacttccttgagttgtgtgtattcaactcacagagttgcacgatcctttacacagagcagacttgtaacactctttttgtggaatttgcaagtggagatttcagccgctttgaagtcaaaggtagaaaaggaaatatcttcctataacaactagacagaatcattcccacaaactgcgttgtgatgtgttcgttcatctcacagagtttaacctttcttttcatagagcagttaggaaacactctgtttgtaaattctgtgagtggatattctgacatcttgtggccttcgttggaaacgggatttcttcatattctgctagacagaagtattctcagtaacttccttgtgatgtgtgtattcaactcacagagttgaacgatcctttacacagagcagacttgaaacactctttttgtggaatttgcaagtggagatttcagccgctttgagttcaatggtagaataggaaatatcttcctatagaaactagacagaatgattctcagaaactcctttgtgatgtgtgtgttcaactcacagagtttaacctttcttttcatagagcagttagtaaacagtctgtttataaagtctgcaagtggatattcagacccctttgaggccttcgttggaaacgggatttctacatattatgctagacagaagaattctcagtaacttcattgtgttgtgtgtattcaactcacagagttgaacgatcctttacacagagcagacttgaaacactctttttctggaatttgcaagtggagatttcagccgctttgaggtcaatggtagaataggaaatatcttcctatagaaactagacagaatgattctcagaaactcctttgtcatgtgtgcgttcaactcacagagtttaacctttcttttcatagagcagttaggaaacactctgtttctaaagtctgcaagtggatattcagacctctttgaggccttcgttggaaacgggtttttttcatataaggctagagagaagaattcccagtaacttccttgtgttgtgtgtgttcaactcacagagttgaactttcatttacacagagcagatttgaaacactctttttgtggaatttgcaagtggagatttcaagcgctttgaggccaaaggcagaaaaggaaatatcttcgtgtaaaaactagacagaatcattctcagaaactgctctgcgatgtgtgtgttcaactctcagagtttaacttttcttttcattcagcagtttggaagcactctgtttgtaaagtctgcacgtggataatttgaccacttagaggccttcgttggaaacgggtttttttcctgtaaggctagacagaagaattcccagtaacttccttgtgttgtgtacattcaactcacagagttgaacgttcccttagacagagcagatttgaaacactccttttgtgcaattggcaagtggagatttcaagcgctttaaggtcaatggcagaaaaggaaatatcttcgtttcaaaactagacagaatcattcccacaaactgcgttgtgaggtgttcgttcaactcacagagtttaacctttcttttcatagagcagttaggaaacagtctgtttgtaaattctgtaagaggatattctgacatcttgtggccttcgttggaaacgggatttcttcatattctgctagacagaagaattctcagtaacttccttgtgttgtgtgtattcaactcacagagttgaatgatcctttacacagaacagtcttgaaacactctttttgtggaatttgcaagtggagatttcagccgctttgaggtcaatggtagaataggaaatatcttcctatagaaactaggcagaatgattctcagaaacttctttgtgatgtgtgtgttcaactcacacagtttaacctttcttttcatagagcagttaggaaacactgtgtttttaaactctgcaagtggatattcagacctctttgaggccttcgttagaaacgggtttcttcatactgtgctagacagaagaattctcagtaacttccttgtgttgtgtgtattcaactcacagagttgaacgatcctttacacagagcagacttgtaacactctttttgtggaatttgcaagtggagatttcagccgctttgaagtgaaaggtagaaaaggaaatatcttcctataaaaactagacagaatgattctcagaaactcctttgtgatgtgtgcgttcaactcacagagtttaacgtttcttttcatagagcagttaggaaacactctgtttgtaaagtctgcaagtggatattcagacctctttgaggccttcgtaggaaacgggtttttttcatataaggctagacagaagaattcccagtaacttccttgtgttgtgtgtgttcaactcacagagttgaactttgatttacacaggagcagatttgaaacactctttttgtggaatttgcaagtggagatttcaagcgctttgaggccaaaggcagaaaaggaaatatcttcgtataaaaactagacagcatcattctcagaaactgctctgcgatgtgtgcgttcaactctcagagtttaacttttcttttcattcagcagtttggaaacactctgtttgtaaagtctgcacgtggatattttgaccacttagaagccttcgttggaaatgggtttttttcctgtaaggctagacagaagaattcccagtaacttccttgtgttgtgtgcattccactcacagagttgaacgttcccttagacagagcagatttgaaacactctatttgtgtaatttgcaagtgtagatttcaagcgctttaaggtcaacggcagaaaaggaaatatcttcgtttcaaaactagacagaatgattcccacaaactgcgttgtgatgtgttcgtacaactcacagagtttaacctttctgttcatagagcagttaggaaacactctgtttgtaaagtctgtaagtggatattcagacatcttgtggccttcgttggaaacgggatttcttcatattctgctagacagaagaattctcagaatcttccttgtgttgtttgtattcaactcacacagttgaacgatcctttacacagagcagatttgaaacactcatttggtggaatttgtaagtggaggtttcagccgctttgaggtccatggtagaaaaggaaatatcttcgtataacaactagacagaatgattctcaaaaacttctttgtgatgtgtgcgttcaactaacagagtttaacctttcttttcatagagcagttaggaaacactctgtttgtaaactctgcaagtggatattcagacctctttgaggccttcgttggaaacgggatttcttcatactgtgctagacagaagaattctcagtaacttctttgtgttgtgtgtattcaactcacagagttgaacgatcctttacacagagcagacttgaaacactctttttgtggaatttgcatgtggagatttcagccgctttgaggtcaatggtagaataggaaatatcttcctatagaaactagacagaatgattctcagaaactcctttgtgatgtgtgcgttcaactcacagagttcaacctttcttttcatagagcagttgggaaacactctgtttgtaaagtctgcaagtggatattcagagttctttgaggccttcgttggaagcgggatttcttcatattctgctagacagaagaattctcagtaactcccttgtgttgtgtgtattcaactcacagagttgaacgatcctttacacagagcagacttgtaacactctttttgtggaatttgcaagtggagatttcagccactttgaagtcaaaggtagaaaaggaaataacttcctataaaaactagacagaatgattctcagaaactcctttgttatgtgtgcgttcaactcacagagtttaacctttcttttcatagagcagttaggaaacactctgtttgtaaagtctgcaagtggatattcagacctccttgaggccttcgttggaagcgggatttcttcatgttcagctagacagaagaattctcagtaactttccttgtgttgtgtgtattcaactcacagagttgaacgatcctttacacagagcagacttgaaacactctttttgtggaatttgcaagtggagatttcagccgctttgaggtcaaaggtagaaaaggaaactatgttcgtataaagagtagacagaatgattctcagaaactcctttgtgatatgtgcgttcaactcacagagtttaacctttattttcatagagcagttaggaaacactctgtttgtaaagtctgcaaggggatattcagacctctttgaggctttcgttggaaacgggatttcttcatattctgctagacagaagaattctcagtaacttccttgtgtagtgtgcattcaactcacagagttcaacgatcctttacacagagctgattagaaacactttttttgttgaatttgcaagtggagatttcagccgctttgaggtcaatggtagaaaaggaaatatcttcgtataaaaactagacagaatgattctcagaaactcctttgtgatgtgtacgttcaactcacagagtttaacctttcttttcttagagcagttaggaaacactctgtttgtaatgtctgcaagtggatattcagacctctttgaggccttcgttggaaacgggtttttttcatataaggctagacagaagaattctcagaaacttccttgtgttgtgtgttttcaactcacagagttgaacgatcctttacacagagcagacttgaaacacttcttttgtggaatttgcaagtggagatttcatccgctttgaggtcaatggtagaataggaaatatcttcctatagaaagtagacagaatgattctcagaaactcctttgtgctgtgtgcgttcagctcacagagtttaacctttcttttcatagagcagttaggaaacactctgtttgtaaagtctgcaagtggatattcagacctctttgaggccttcgttggaaacgggatttcttcatattctgctagacagaagaattctcagaatcttccttgtgttgtgtgtattcaactcacagagttgaaagaccctttacacagagcggacttgaaacactctttttgtggaatttgcaagtggagatttcagccgcgttgaggtcaatggtagaaaaggaaatatcttcgtataaaaactagacagaatgattctcagaaactcctttgtgatgtgtgcgttcaactcacagagtttaacctttcttttcatagagcagttaggaaacactctgtttgtaaagtctgcaagtggatattcagacctctttgaggccttcgttggaaacgggatttcctcatattatgctagacagaagaattctcagtaacttccttgtgttgtgtgtattcaactcacagagttcaatgatcctttacacagaacagacttgaaacactcttgttgtggaatttgcaagtggagaattcagccgctttgaggtcaacggtagaaaaggaaatatcttcctatagaaactagacagaatgattctcagaaactcctttgtgatgtgtgcgttcaactcacagagtttagcctttcttttcatagagcagttaggaaacactctgtttgtaaagtctgcaagtggatattcagacctctttgaggccttcgttggaaacgggatttcttcatattctgctagacagaagaattctcagtaacttccttgtgttgtgtgtattcaactcacagagttgaacgatcctttacacagagcggacttgaaacactctttttgtggaatttgcaagtggagatttcagccgcattgaggtcaatggtagaaaaggaaatctcttcgtataaaaactagacagaatgattgtcagaaactcctttgtgatgtgtgcgttcaactcacagagtttaacctttcttttcatagagcagttaggaaacactctgtttgtaaagtctgcaagtggatattcagacatctttgaggctttcgttggaaacgggatttcatcatattctgctagacagaagaattctcagaaacttccttgtgttttgtgttttcaactcacggagttgaacgatgctttacacagagtagacttgaaacactctttttgtggaatttgcaattggagatttcagccgctttgaggtcaatggtagaaaaggaaatatcttcgtataaaaactagacagaatgattctcagaaacttctttgtgatgtgtgcgttcaactcacagagtttaacctttcttttcatagagcagttaggaaacactctgtttctaaactctgcaagtggatattcagacctccttgaggccttcgttggaaacgggatttcttcatactatggtagacagaagaattctcagaatcttccttgtgttgtgtgtattcaactcacagagttgaacgatcctttacacagagcagacttgaaacactctttttgtggaatttgcaagtggagatttcagccgctttgaggtcaatggcagaaaaggaaatatcttcgtatgaaaactagacagaatgattctcagaaactcctttgtgatgtgtgcgttcaactcacagagtttaaccttacttttcatagagcagttaggaaacactctgtttgtaaagtctgcaagtggatattcagacctctttgaggccttcgttggaaacgggatttcttcatattctgctagacagaagaattctcagtaacttccttgtgttgtgtgtattcaactcacagagttgaacgatcctttacacagagcagacttgaaacactccttttgtggaatttgcaagtggagatttcagccgctttgaggtcaatagtagaaaaggaaatatcttcgtagaaaaactagacagaatgattctcagaaactcctttgtgatgtgtgcgttcaactcacagagtttaacttttcttttcatagagcagttaggaaacattctgtttgtaaagtctgcaagtggatattcagacctctttgtggccttcgttggaaacgggatttcttcatattctgctagacagaagaattctcagtaacttccttgtgttgtgtgtattcaactgacagagttgaactttcatttagagagagcagatttgaaacactgtttttgtggaatttgcaagtggagatttcaagctctttggggccaaaggcagaaaaggaaatatcttcgtagaaaaactagacagaatcattctcagaaactgctctgcgatgtgtgcgttcaactctcagagtttaacttttcttttcattcagcagtttggaaacactctgtttgtaaagtctgcacgtggataatttgaccaccgagagaccttcgttggaaacgggtttttttcatgtaaggctagacagaagaattcccagtaacttccttgtgttgtgtgcattcaactcacagagttgaacgttcccttagacagagcagatttgaaacactctatttgtgcaatttgcaagtgtagatttcaagatctttaaggtcaacggcagaaaaggaaatatcttcgtttcaaaactagacagaatgattctcataaactcctttgtgatgtgtgcgtttaactcacagagtttaacttttcttttcatagagcagttaggaaacactctgtttgtaaagtctataagtggatattctgacatcttgtggccttcgttggaaacgggatttcttcatattctgctagacagaataattctcagtaaattccttgtgttgtgtgtattcaagtcacagagttgaacgatcctttacagagagcagacttgaaacactctttttgtggaatttgcaagtggagatttcagccgctttgaggtcaatagtcgaaaaggaaatatcttcgtagaaaaactagaaagaatgattctcagaaaatcttttgtgatgtgtgcgttcaactcacagagttttacttttcttctcatagagcagttaggaaacactctgtttgtaaagtctgcaagtggatattcagacctctttgaggccttcgttggaaacgggatttcttcatattatgctagacagaataattctcagtaacttccttgtgttgtgtttattcaactcacagagttgaatgatcctttacacagagcagacttgaaacactctttttgtggaatttgcaagtggagatatcagccgctttgaagtcaatggtagaaaagtaaatatcttcgtataaagactagacagaatgattctcataaactcctttgtgatgtgtgcgttcaactcacagtagtttaacctttcttttcatagagcagttaggaaacactctgtttgtaaagtctgcatgtggatattcagacctctttgaggccttccttggaaacgggatttcttcatattctgctagacagaataattctcagtaacttccttgtgttgtgtgtattcaactcacagagttgaacgatcctttacagagagcagacttgaaaaactctttttgtgggatttgcaagtggagatttcagccgctttgagctcaatggtagaataggaaatatcttcctaaagaaactagacagaaagattctcagaaactcctttgtgatgtgtgcgttcaactcacagagtttaacctttcttttcatagagcagttaggaaacactctgtttgtaaagtctgcaagtggatattcagacctgtttgaggccttcgttggaaacgggtttttttcatataaggctagacagaagaattctcagtaacttccttctgttgtgtgtattcaactcacagaattgaacgatcctttacacagagcagacttgacacactctttttgtggaatgtgcaagtggagatttcagccgctttgaggtcaatggtagaaaaggaaaaatcttcgtatagaaacaagacagaatgattctcataaactcctttgtgatgtgtgcgttcaactcacagagtttaacctttcttttcatagagcagttaggaaacactctgtttgtaaagtctgcaagtggatattcagacctccttgagaccttcgttggaaacgggatttcttcatattctgctagacagaagaattctcagtaacttccttgtgttgtgtgtattgaactcgcagagttgaacgatcctttacacagagcagacttgaaacactctttttgtggaattttcaagtgcagatttcagccgctttgaggtcaatagtagaaaaggaaatatcttcgtagaaaaactagacagaatgattctcagaaactcctttatgatgtgtgcattcaactcacagaggttaacctttcttttcatagagcagttaggaaacactctttttgtaaagtctgcaagtggataatcagacctctttgaggccttcgttggaaacgggatttcttcatactatgctagacagaagaattctcagtaacttccctgtgttgtgtgtattcaactgacagagttgaactttcttttagagagagcagatttgaaacactgtttttgtggaatttgcaactggagatttcaagcgctttggcgccaaaggcagaaaaggaaatatcttcgtataaaaactagacagaatcattctcagaaactgctctgcgatgtgtgcgttcaactctcagagttaaacttttcttttcattcagcagtgtggaaacactctgtttgtaaagtctgcacgtggatattttgaccgcttagaggccttcgttggaaacggttttttttcatgtaaggctagacagaagaattcccagtaacttccttgtgttgtgtgcattcaactcacagagttgaacgttcccttagacagagcagatttgaaacactctatttgtgcaatttgcaagtgtagatttcaagcgcgttaaggtcaacggcagaaaaggaaatatcttcgtttcaaaactagacagaatcattcccacaaactgcgttgtgatgtgttcgttcaactcacagagtttaacctttctgttcatagagcagttaggaaacactctgtttgtaaagtctgtaagtggatattctgaaatcttgtggccttcgttttaaacgggatttcttcatattctgctagacagaagatttctcagtaacttccttgtgttgtgtgtattcaactcacagagttgaatgatcctttacacagaacagtcttgaaacactctttttgtggaatttgcaagtggagatttcagccgctttggggtcaatggtagaataggaaataccttcctatagaaactagacagaatgattctcagaaaatcttttgtgatgtgtgcgttcaactaacaaagtttaacttttcttctcatagagcagttacgaaacactctgtttgtaaagtctgcaagtgtatattcagacctctttgaggccttcgttggaaacgggatttcttcatattatgctagacagaataattctcagtaacttccttgtgttgtgtgtatttaactcacagagttgaaggatcctttacagagagcaggcttgaaacactctttttgtcgaatttgcaagtggagatttcagccgctttgaggtcaatggtagaataggaaatatgttcttatagaaactagacagaatgattctcagaaactcctttgtgatgtgtgcgttcaactcagagtttaacctttcttttcatagagcagttaggaaacactctgtttgtaaagtctgcaagtggatattcagacctctttgaggccttcgttggaaacgggatttcttcatattatgctagacagaagaattctcagtaacttccttgtgttgtgtttattcaactcacagagttgaatgatcctttacacagagcagacttgaaacactctttttttggaatttgcaagtggagatttcagccgctttgaagtcaatggtagaaaagtaaatatcttcgtataaagactagacagaatgattctcagaaacttctttgtgatgtgtgcgttcaactcacagagtttaacctttcttttcatagagcagttaggaaacactctgtttgtaaagtctgcaagtggatattcagtcctccttgaggccttcgttggaagcgggatttcttcatgttctgctagacagaagaattctcagtaacttccttgtgttgtgtgtattcaactctcagagttcaacgatcctttacacagagcagacttgaagcactctttttgtggaatttgcaagtggagattttagccgctttgaggtcaatggtagaataggaaatatcttcctatagaaactagacagaatgattctcagaaactcctttgtgatgtgtgcgttcaactcacagagtttaacttttcttttcatagagcagttaggaaacactctgtttgtaaagtctgcaagtggatattcagacctctttgaagccttcgttggaaacgggatttcttcatattctgctagacagaagaattcccagtaacttccttgtgttgtgtgtgttcaactcacagagttgaactttgatttacacagaacagatttgaaacactctttttgtggaatttgcaagtggagatttcaagcgctttgaggccaaaggcagaaaaggaaatatcttcgtataaaaactagacagaatcattctgagaaactgctctgtgatttgtgcgttcaactctcagagtttaacttttcttttcattcagcagtttggaaactctctctttgtaaagtctgcacgtgcatattttgaacacttagaggccttcgttggaaacgggtttttttcatgtaaggctagacagaagaattcccagtaacttccttgtgttgtgtgcattcaactcacagagatgaacgttcccttagacagagcagatttgaaacactctatttgtgcaatttgcaagtgtagatttcaagcgctttaaggtcaatgacagaaaaggaaatatcttcgtttcaaaactagacagaatcattcccacaaactgcgttttgatgtgttcgttcaactcacagaatttaacctttcttttcatagagcagttaggaaacactctgtttgtaaattctgtaagtggatattctgaaatcttgcagccttcgttggaaacgggctttcttcatattctgctagacagaagaattctcagtaacttccttgtgttgtgtgtattcaactcacagagttgaacgatcctttacacagagcagacttgaaacactctttttgtggaatttgcaagtggagatttcagccgctttgaggtcaatggtagaaatggaaatatcttcgtataaagactagacagaatgattctcagaaactcctttgtgatgcgtgcgttcaactcacagagtttaacctttcttttcatagagcagttaggaaacactctgtttgtaaagtctgcaattggatattcagacctctattaggccttcgttggaaacgggatttcttcatattctgctagacagaagaattctcagtaacttccttgtgttgcgtgttttcaaatcacagagctgaacgatcctttacaaagagcagacttgaaacactctttttgtggaatttgcaagtggagatttcagccgctttgaggtcaatagtagaataggaaatatcttcctatagaaactagacagaatgattctcagaaactcctttgtgatgtgtgcgttcaactcacagagtttaacttttcttttattagggcagttaggaaacactctgtttgtaaagtcttcaagtggatattcagacctctttgaggccttcgttggaaacgggatttcttcatattctgctagacagaagaattctcagtaacttccttgtgttgtgtgtattcaactcacagagttgaacgatcctttacagagagcagacttgaaaaactctttttgtggaatttgcaagtggagatttcagccgctttgaggtcaatggtagaataggaaatatcttcctatagaaactagacagaatgattctcagaaactcctttgtgatgtgtgcgttcaactcacatagttcaacctttcttttcatagagtagttgggaaacactctgtttgtaaagtctgcaagtggatattcagacttctttgaggccttcgttggaagcgggatttcttcatattctgctagacagaagaattctcagaaacttccttgtgttgtgtgttttcaactcacagagttgaacgaccctttacacagagcagaattgaaacactctctttgtggaatttgcaagtggagatttcagccgctttgaggtcaatggtagaaaaggaaatatcttcgtataaaaactagacagaatgattctcagaaactcctttgtgatgtgtgcgttcaactcacagagtttaacctttcttttcatagagcagttgggaaacactctgttcgtaaactctgcaagtggatattcagacctctttgaggccttcgttggaaacgggatttcttcatattctgctagacagaagaattctcagaaacttccttgtgttgtgtgtattcaactcacacagttgaacgatcctttacacagagcagacttgaaacactctttttgtggaatttgcaagtggagatttcagccgctttgaggtcaatggtagaataggaaatatcttcctatagaaactagacagaatgattctcagaaactcctttgtgatgtgtgcgttcaactcacagagtttaacctttcttttcatagagcagttaggaaacactctgtttataatgtctgcaagtggatattcagacctctttgaggccttcgttggaaacgggatttcttcatattatgctagacagaagaattctcagtaacttccttgtgttgtgtgtattcaacccacagagttgaacgatcctttacacagagcatacttggaacactcttcttgtggaatttgcaagtggagatttcagccgctttgagatcaatggtagaataggaaatatcttcgtataaaaactagacagaatgattctcagaaaatcctttgtgatgtgtgtgttcaactcacagcagtttaacctttcttttcatagagcagttagtaaacactctgtttataaagtctgcaagtggatattcagacacctttgaggacttcgttggaaatgggatttcttcatattatgctagacagaagaattctcagtaacttccttgtgttgtgtgtattcaactcacagacttgaacgatcctttacacagagcagacttgaaacactctttttgtggaatttgcaagtggagatttcagccgctttgaggtcaatggtagaaaaggtaactatcttcgtataaagactagacagaatgtttctcagaaactcctttgtgatgtgtgcgttcaactcacagagtttaacctttcttttcatagagtagttaggaaacactctgtttgtaaagtctgcaagtggatattgagacctctttgaggccttcgttggaaacgggatttcttcatattctgctagacagaagaattctcagtaacttccttgtgttgtgtgtattcaactcacagagttgaacgatcctttacacagagcagacttggaacactgtttttgtggaatttgcaagtggagatttcagccgcgttgaggtcaatggtagaaaaggaaatatcttcgtataaaaactagacagaatgattctcagaaactcctttgtgatgtgtgcgttcaactcacagagttgaagttttcttttcttagagcagttaggaaacactctgtttgtaaagtctgcaagtggatattcagacctctttgaggccttcgttggaaacggggtttcttcatattctgctagacagaagaattctcagtaacttccttgtgttgtgtgtattcaactcacagagttgaacgatcctttacacagagcagacttgaaacactctttttgtgggatttgcaagtggagatttcagccgctttgaggtcaatggtagaaaaggaaatatcttcgtataaagactagacagaatgattctcagaaactcctttgtgatgtgtgtgttcaactcacagagtttatcctttcttttcatagagcagttaggaaacactctgtttgtaaagtctgcaagtggatattcagacatccttggggctttcgttggaaacgggatttcttcatattctgctagaaagaagaattctcagtaacttccttgtgttgtgtgtattcaactcacagagttgaacgatcctttacacagagcagacttcaaacactctttttgtggaatttgcaagtggagatttcagccgctttgaggtcaatggtagaaaaggaaactatcttcatataaagactagacagaatgattctcagaaactcttttgtgatgtgtgcattcaactcacagagtttaacctttcttttcatagagcagttaggaaacactctgtttgtaaagtctgcaagtggatattcagacctctttgaggccttcgttggaaacgggatttcttcatattatgctagaaagaagaattctcagtaacttccttgtgttgtgtgtattcaactcacagagttgaacgatcctttacacagagcagacttgaaacactctttttgtggaatttgcaattggagatttcagcccctttgaggtcaatggtagaataggaaatatcttcctatagaaactagacagaatgattctcagaaactcctttgtgatgggtgtgttcaactcacagagtttaacctttcttttcatagagcagttagtaaacactctgtttataaattctgcatgtggatattcagatccctttgaggccttcgttggaaacgggatttcttcatattatgctagacagaagaattctcagaaacttccttgtgttgtgtgttttcaactcacagagttgaacgatcctttacacagagcagacttgaaacactctttttgtggaatttgcaagtggagatttcagccgctttgaggtcaatggtagaataggaaatatcttcgtataaaaactagacagaatgattctcagaaactcctttgtgatgtgtgcgttcaactcacagagtttaacctttctcttcatagagcagttaggaaacactctgtttgtaaagtctgcaagtggatattcagacctctttgaggccttcgttggaaacggtatttcttcatattctgctagacagaagaattctcagtaacttccttgtgttgtgtgtattcaactcacagagttgaatgatcctttacacagaacagacttgaatcactcttgttgtggaattttcaagtggagatttcagccgctttgtggtcaacggtagaataggtaatatcttcctatagaaactagacagaatgattctcagaaactcctttgtgatgtgtgcgttcaaatcacagagtttaacctttcttttcatagagcagttaggaaacactctgtttgtaaagtctgcaagtggatattcaaacccctttgaggccttcgttggaaacggtatttcttcatattctgctagacagaagaattctcagtaacttccttgtgttgtgtgtattcaactcacagagttgaacgatcctttacacagagcagaattgaaacactctttttgtggaatttgcaagtggagatttcagccgcgttgaggtcaatggtagaaaaggaaatatcttcgtataaaaactagacagaatgattctcagaaactcctttgtgatgtgtgcattcaactcacagagtttaacctttcttttcatagagcagttaggaaacactctgtttgtaaagtctgcaagtggatattcagacctctttgaggccttcgttggaaatgggatttcttcatattctgctagagagaagaattctcagtaacttcattgtgttgtgtgtattcaactcacagatttcaacgatcctttacacagagcagacttgaaacactctttttctggaatttgcaagtggagatttcagccgctttgaggtcaatggtaggataggaaatatcttcctatagaaactagacagaatgattctcagaaactcctttgtgatgtgtgcgttcaactcacagagtttaacctttcttttcatagagcagttaggaaacactctgtttgtgaagtctgcaagtggatattcagacctctttgaggccttcgttggaaacgggtttttttcatataaggctagacagaagaattctcagaaacttccttgtgttgtgtgtattcaactcacagagttgaacgatcctttacacagggcagacttgaaacactctttttgtggaatttgcaaatggaaatttcagccgctttgaggtcaatggtagaaaaggaaatatcttcgtataaaaactagacagaatgattctcagaaactactttgtgctgtgtgcgttcagctcacagagtttaacctttcttttcatagagcagttaggaaacactctgtttgtaaagtctgcaagtggatattcagacatctttgtggctttcgttggaaacgggatttcttcatattctgctagacagaagaattctcagaaacttccttgtgttgtgtgttttcaactcacagagttcaacgatccattacacagagtagacttgaaacactctttttgtggaattggcaagtggagatttcagccgctttgaggtcaatggtagaaaaggaaatatgcttcgtataaaaactagacagaacgattctcagaaactcctttgtgatgtgtgcgttcaactcacagagtttaacctttcttttcatagagcagttaggaaacactctgtttgtaaagtctgcaagtggatattcagacctctttgaggccttcattggaaacgggatttcttcctattctgctagacagaagaattctcagtaacttccttgtgttgtgtgtattcaactcacagagttggacgatcctttacacagagcagacttgaaacactctttttgtggaatttgcaagtggaggtttcagccgctttgaggtcagtagtagaaaaggaaatatcttcgtagaaaaactagacagaatgattctcagaaactcctttgtgatgtgtgcgttcagctcacagagtttaacctttcttttcatagagcagttaggaaacactctgtttgaaaagtctgcaagtggatattctgacctccttcagggcttcgttggaaatgggatttcttcatattatgatggacagaagaattctcagtaacttccttgtagtgtgtgtattcaactcacagagttaaacgatcctttacacagagcagacttgaaacactcttgttgtggaatttccaagtggagatttcagccgctttgaggtcaatggtagaataggaaatatcttcctatagaaactagacagaaggattctcagaaactcctttgtgatgtgtgcgttcatctcacaaagtttaacctttctttccatagagcagttaggaaacactctgtttgtaaagtctgcaagtagatattcagacctttttcaggccttcgttggaaacgggatttcttcatactctgctagacagaagaattctcagaaacttccttgtgttgtgtgttttcaactcacagagttgaacgatgctttacacagagtagacctgaaacactctttttgtgtaatttgcaagtggagatttcagccgctttgaggtcaatggtagaaaagggaatatcttcgtataaaaactagacagaatgattctcagaaactcctttgtgatgtgtgtgttcaactcacagagtttaacctttcttttcatagagcagttaggaaacactctgtttgtaatgtctgcacgtggatatttggacttctttgaggccttcgttggaaacgggtttttttcatttaaggctagacagaagaattctcagaaacttccttgtgttgtgtgtattcaactcacagagttgaacgatcctttacacagagcagacttgaaacactctttttgtggaatttgcaagtggagatttcagccgctttgagttcaatggtagaataggaaatatcttcctatagaagctagacagaatgattctcagaaacttctttgtgatgtgtgcgttcaactcacagagttcaacctttcttttcatagagcagttaggaaacactctgtttgtaaactctgcaagtggatattcagacctgtttgaggccttcgttggaaacgggatttcttcatactatgctagacagaagaattctcagtaacttccttgtgttgtgtgtattcaactcacagagttgaacgatcctttacacagagcagactagaaacattctttttgtggaatttgcaagaggagatttcagccgctttgaggtcaatggtagaataggaaatatcttcctatagaaactagacagaacgattctcagaaactcctttgtgatgtgtgcgttcaactcacagagtttaacctttcttttcatacagcagttaggaaacactctgtttgtaaagtctgcaagtggatattcagacctctttgaggccttcgttggaaacgggatttcttcctattctgctagacagaataattctcagtaacttccttgtgttgtgtgtattcaactcacagagttgaacgatcctttacacagagcagacttgaaactctctttttgtggaatttgcaagtggagatttcagccgctttgaggtcaatagtagaaaaggaaatatcttcgtagaaaaactagacagaatgattctcagaaactcctttgtgatgtgtgtgttcaactcacagagtttaacctttcttttcatagagcagttagtaaacactctgtttataaagtctgcaagtggatattcagaaccctttgaggccttcgttggaaacgggatttcttcatattatgctagacagaagaattcccagtaacttccttgtgttgtgtgtgttcaattcacagagttgaactttgatttacacagagcagatttgaaacactctttttgtggaatttgcaagtggagatttcaagcgctttgaggccaaaggcagaaaaggaaatatcttcgtataaaaactatacagaatcattctcagaaactgctgcgtgatgtgtgtgttcaaccctcagagtttaactttccttttcattcagcggtttggaaacactctgtttgtaaagtctgcacgtggatattttgaccacttagaggtcttcgttggaaacgggtttttttcatgtaaggctagacagaagaattcctagtaacttccttgtgttgtgtacattcaactcacagagttgaacgttcccttagacagagcagatttgaaacactctttttgtgcaattggcaagtggtgatttcagccgctttgaggtcaatggtagaaagggaaatatcttcgtattaaaactagacagaatgattctcagaaactcctttgtgatgtgtgcgttcaactcacagagtttaacctttctgttcatagagcagttaggaaacactctgtttgtaaagtctgcaagtggatattcagacctccttgaggccttcgttggaaacgggatttcttcatgttctgctagacagaagaattctcagtaacttccttgtgttgtgtgtattcaactcacagagttgaacgatcctttacacagagcagacttgaaacactctttttgtggaattggcaagtggagatttcagccgctttgaggtcaatggtagaaaaggaaatatcttcgtataaagactagacagaatgattctcagaaacttcattgtgatgtgtgcgttcaactcacagagtttaacctttcttttcatagagcagttaggaaacactctgtttgtaaagtctgcaagtggatattcagacctctttgaggccttcgttggaaacgggtttttttcataaaaggctagacagaagaattctcagtaacttccttgtgttgtgtgtattcaactgacagagttgaactttcatttagagagagcagatttgaaacactgtttttgtggaatttgcaagtggagatttcaagcgctttggagccaaaggcagaaaaggaaatatcttcgtataaaaactagacagaatcattctcagaaactgctctgcgatgtgtgcgttcaactctcagagtttaacttttcttttcattcagcagtttggaaacactctgttggtaaagtctgcacgtggatattttgaccacttagaggccttcgttggaaacgggattttttcctgtaaggctagacagaagaattcccagtaacttccttgtgttgtgtgcattcaactcacagagttgaacgttcccttagacagagcagatttgaaacattctatttgtgtaatttgaaagtgtagatttcaagcgctttaaggtcaatggcagaaaaggaaatatcttcgtttcaaaactagacagaatcattcccacaaactgcgttgtcatgtgttcgttcaactcacagagtttaacctttcttttcatagagcagttaggaaacagtctgtttgtaaattctgtaagtggatattctgacatcttgtggccttcgttggaaacgggatttcttcatattctgctagacagaagaattctcagtaacttcttggtgttgtgtgtattcaactcacagagttgaacgatgctttacacagagcagacttgaatcactcgttttgtggaatttgcaagtggagatttcagccgctttgaggccaaaggcagaaaaggaaatatcttcgtataaaaactagacagaatgattctcagaaactcctttgtgatgtgtgcgttcaactcacagagtttaacctttcttttcatagagcagttaggaaacactctgcttgtaaagtctgcaagtgcatattcagccctctttgaggccttcgttggaaacgggtttttttcatataaggctagacagaagaattctcagtaacttccttgtgtcgtgtgtattcaactcacagagttgaatgatcctttacaaagagcagacttgaaacactctttttgtggaatttgcaagtggagatttcagccgctttgaggtcagtggtagaataggaaatatcttcgtataaaaactagacagaatgattctcagaaactcctttgtgatgtgtgcgttcaactcacagagtttaacctttcttttcatagagcagttaggaaacactctgtttataaagtctgcaagtggatattcagacctctttgaggccttcgttggaaacgggatttcttgatactatgctagacagaagaattctcagtaacttccttgtgttgtgtgtattcaactgacagagttgaactttcatttagacagaggagatttgaaacactctttttgtggaatttgcaagtggagatttcaagcgctttgattccaaaggcagaaaaggaaatatcttcgtataaaaactagacagaatcattctcagaaactgctctgcgatgtgtgagttcaactctcagagtttaacttttcttttcattcagcagtttggaaacactctgtttgtaaagtctgcacgtggataacttgaccacttagaggccttcgttggaaacgggtttttttcttgtaaggctagacagaagaattcccaggaacttccttgtgttgtgtacattcaactcacagagttgaacgttcccttagacagagcagatttgaaacactctttttgtgcaattggcaagtggtgatttcagccgctttgaggtcaatggtagaaaaggaaatatcttcttataaaaactagacagaatcattcccaaaaactgcgttgtgatgtgttccttcatctcacagagtttaacctttcttttcatagagcagttaggaaacagtctgtttgtaaattctgtaagtggatattctgacatcttgtggccttcgttggaaacgggatttcttcatattctgctagacagaagaattctcagtaacttccttgtgttgtgtgcattcaactcacagagttgaacgatactttacacagggcagacttaaaacactctttttgtggaatttgcaagcggagatttcagcctctttgaggttaatggtagaaaatgaaatatcttcgtatagaaactagacagaatgattctcataaactcctttgtgatgtgtgccttcaactcacagagtttaacctttcttttcatagagcagttagtaaacactctgtttataaagtctgcaagtggatattcagacccctttgaggccttcgttggaaacgggatttcttcatattatgctagacagaagaattctcagtaacttccttgtgttgtgtgtattcaactcgcagagttgaacgatcctttacacagagcagacttgaaacactctttttgtggaatttgcaagtggagatttcagccgctttgggttgaatggtagaataggaaatatcttcctatagaaactagacagagtgattctcagaaactcctttgtgatgtctgcgttcaactcacagagtttaacctttcttttcatagagcagttaggaaacactctgtttgtaaagtctgcaagtggatattcagacctccttgaggccttcgttggaaacggtatttcttcatattctgctatacagaagaattcccagtaacttccttgtgttgtgtgtgttcaactctgtgagttgaactttcatttacacagagcagattggaaacactctttttgtggaatttgcaagtggagatttcaagcgctttgaggccaaaggcagaaaaggaaatatccttcgtataaaaactagacagaatcattctcagaaactgctctgcgatgtgtgcgttcaaccctcagagtttaacttttcttttcattcagcagtttggaatcactctgtttgtaaagtctgcacgtggatattttgaccacttagaggccttcgttggaaactggtttttttcctgtaaggctagacagaagaattcccagtaaattccatgtgttgtgtgcattcaactcacagagttgaacgttcccttagacagagcagatttgaaacactctatttgtgcaatttgcaagtgtagatttcaagcgctttaaaggtcaatggcagaaaagggaatatcttcgtttcaaaactagacagaatcattcccacaaactgagttgtgatgtgttcgttcaactcacagagtttaacctttctgttcatagagcagtgaggaaacactctgtttgtaaagtctgtaagtggatattctgacatcttgtggccttcgttggaaacaggatttcttcatattctgctagacagaataattctcagtaacttccttgtgttgtgtgtattcaactgtcagagttgaacgatcctttacagagagcagacttgaaacactctttttgtggaatttgcaagtggagatttcagccgctttgaggtcaatggtagaataggaaatatcttcctatagaaactagacagaatgattctcagaaactcctttgtgatgtgtgcgttcaactcacagagtttaacctttctgttcatagagcagttaggaaacactctgtttgtaaagtctgcaagtggatattcagacctccttgaggtcttcgttggaaacgggatttctttatattctgctagacagaagaattctcagtaacttccttgtgttgtgtgtattcaactgacagagttgaactttcatttagagagagctgatttgaaacactgtttttgtggaatttgcaagtggagatttcaagcgctttggggccaaaggcagaaaaggaaatatctttgtataaaaactagacagaatcattctcagaaactgctctgcgatgtgtgcgttcaactctcagagtttaacttttcttttcattcagcagtttggaaacactctttttttaaagtctgcacgtggataatttgaccacttagaggccttcgttggaaacgggtttttttcatgtaaggctagacagaagtattcccagtaacttccttgtgttgtgtgcattcaactcacagagttgaacgttccctaggacagagcaggtttgaaacactctatttgtgcaatttgcaagtgtagatttcaagcgcattaaggtcaatggcagaaaaggaaatatcttcgattcaaaactagacagaatcattcccacaaactgcgttgtgatgtgttcgttcaactcacagagtttaacctttctgttcatagagcagttaggaaacactctgtttatacagtctgcaagtggatattcagacctccttgaggccttcgttggaaacgggatttcttcatattctgctagacagaagaattctcagtaacttccttgtgttgtgtgtattcaactcacacagttgaacgatcctttacacagagcagacttgaaacactctttttgtggaatttgcaagtggagatttcatccgctttgaggtcaatggtagaataggaaatatcttcctatagaaactagacagaatgattctcataaactcctttgtgatgtgtgcgttcaactcacagagtttaacctttcttttcatagagcagttaggaaacactctgtttgtaaagtctgcaagtggatattcagacctctttgagtccttcgtttgaaacgggatttcttcatattctgctagacagaagaattctcagtaacttccttgtgttgtgtgtattcaactcacagatttgaacgatcctttacacagagcagacttgtaacactctttttgtggaattcgcaagtggagatttcagcagctttgaagtcaaaggtagaaaaggaaatatcttcctataaaaactagacagaatgattctcagaaactcctttgggatgtgtgcgttcaactcacagagtttaacctttcttttaatagagcagttaggaaacactctggttataaagtctgcaagtggatattcagacctctttgaggccttcgttggaaacgggatttcttcatattctgctagacagaagaattcccagtaacttccttgtgttgtgtgtgttcaactcacagagttgaactttcatttacacagagcagatttgaaacactctttttgtggaatttgcaagtggagatttcaagcgctttgaggccaaaggcagaaaaggaaatatcttcatttcaaaactagacagaatcattctcagaaactgctctgcgatgtgtgcgttcaactctcagagtttaactttgcttttcattcagcagtttggaaacactctgtttgtaaagtctgcacgtggataatttgaccacttagaggccttcgttggaaacgggtttttttcatgtaaggctagagagaagtattcccaggaacttccttctgttgtgtacattcaactcacagagttgaacgttcccttagacagagcagatttgaaacactctttttgtgcaattggcaagtggtgatttcagccgctttgaggtcaatggtagaaaaggaaatatcttcgtataaaaactagacagaatgattctcagaaacttcattgtgacgtgtgcgttcaagtcacagagtttaacctttcttttcatagagcagttaggaaacactctgtttgtaaagtctgcaagtggatattcagacctctttgaggccttcgttggaaacgggatttcttcatactgtgctagacagaagaattctcagtaacttccttgtgttgtgtgtattcaactcacagagttgaacgatcctttacagagagcagacttgaaacacactttttgtggaatttgcaagtggagatttcagccgctttgaggtcaatggtagaaaaggaaatatcttcgtataaagactagacagaatgattctcagaaactcctttgtgatgtgtgcgttcaacaaacagagtttaacttttcttttcatagagcagttaggaaacactctgtttgtaaagtctgcaagtggatattcagagctctttgaggccttcgttggaaacgggatttcttcatattctgctagacagaagaattctcagtaacttccttgtgttgtgtgtgttcaactcacagagttcaacgatgctttacacagagtagacttgaaacacactttttgttgaatttgcaagtggagatttcagccgctttgaggtcaatggtagaataggaaatatcttcctatagaaactagacagaatcattctcagaaactgctctgcgatgtgtgcgttcaactctcagagtttaacttttcttttcattcagcagtgtggaaacactctgtttgtaaagtctgaaggtggatatgttgaccacttagaggccttcgttggaaacgggtttttttcctgtaaggctagacagaggaattctcagtaacttccttgtgttgtgtgtattcaactcacagagttgaacgatcctttacacagagcagacttgaaacactctttttgtggaatttgcaagtggagatttcagccgctttgagttcaatggtagaataggaaatatcttcctatagaaactagacagaatgattctcagaaactcctttgtgatgtgtgcgttcaactcacagagtttaacgtttcttttcatagagcagttaggaaacactctgtttgtaaagtctgcaagtggatattcagacctccttgaggctttcgttggaaacgggatttcttcctattctgctagacagaagaattctcagtaacttccttctgttgtgtgtattcaactgacagagttgaagtttcatttagagagagcagatttgaaacactgtttttgtggaatttgcaagtggagatttcaagcgctttggggccaaaggcagaaaaggaaatatcttcgtataaaaactagacagaatcattctcagaaactgctctgcgatgtgtgcgttcaactctcagagtttaacatttcttttcattcagcagtttggaaacactctgtttgtaaagtctgcacgtggatattttgaccacttagaggccttcgttgcaaacgggtttttttcctgtaaggctagacagaagaattctcagtaacttccttgtgttgtgtgtattcaactcacagagttgaacgatcctttacacagagcagtcttgaaacactcttgttgtggaatttgcaagtggagatttcagccgctttgaggtcaatggtagaataggaaatatgttcctatagaaactagacagaatgattctcaaaaactcctttgtgatgtgtgcgttcaactcacagagttcaacctttcttttcctagagcagttgggaaacactctgtttgtaaagtctgcaagtggatattcagacatccttgaggctttcgttggaaacgggatttcttcatgttctgctagacagaagaattctcagtaacttccttgtgttgtgtgtattcaactgacagagttgaacattcatttagagagagcagatttgaaacactgtttttgtggaatttgctagtggagatttcaagagctttggggccaaaggcagaaaaggaaatatcttcgtataaaaactagacagaaatcattctcagaaactgctctgcgatgtgtgcgttcaactctcagagtttaacttttcttatcattcagcagtttggaaacactctgtttgtaaagtctgcacgtggataatttgaccacttagaggccttccttggaaacgggtttttttcatgtaaggctagacagaagaattcccagtaacttccttgtgttgtgtacattcaactcacagagttgaacgttcccttagagagaacacatttgaaacactctttttgtgcaattggcaagtggtgatttcagccgctttggggtcaatggtagaaaacgaaatatcttcgtataaaaactagacagagtgattctcagaaactcctttgtgatgtgtgcattcaactcacagagtttaacctttcttttcatagagcagttaggaaacactctgtttgtaaagtctgcaagtggatattcagacctctttgaggccttcgttggaaacgggattttttcatataaggctagacagaagaattctcagtaacttccttgtgttgtgtgtattcaactcacaggagttgaacgatcctttacacagagcagacttgaaacactctttttgcggaatttgcaagtggagatttcagccgctttgaggtcaatggtagaataggaaatatcttcctatagaaactagacagaatgattctcagaaactcctttgtgatgtgtgcgttcaactcacacagtttaacctttcttttcatagagcagttgggaaacactctgtttgtaaagtctgcaagtggatattcagacctccttgcggccttcgttggaaacgggatttcttcatattatgctagacagaagaattctcagtaacttccttgtgttgtgtgtattcatctgacacagttgaactttcatttagagagagcagatttgaaacactatttttgtggaatttgcaagtggagatttcaagcgctttggggccaaaggcagaaaagtaaatatcttcgcatacaaactagacagaatcactctcagaaactgctctgtgatgtgtgcgttcaactctcagagtttaacttttcttttcattcagcagtttggaaacactctgtttgtaaactctgcacgtggatattttgaccacttagaggccttctttggaaacgggtttttttcatgtaaggatagacagaagaattctcagtaacttccttgtgttgtgtgctttcaactcacggagttgaacgatcctttacacagagcagattagaaacactctttttgtggaatttgcaagtggagatttcagacactttgaggtcaatgatagaaaaggaaatatcttcgtataaaaactagacagaacgattctcagaaactcctttgtgatgtatgcgttcaactcacagagtttaacctttcttttcatagagcagttaggaaacactctgtttgtaaagtctgcaagtggatattcagacctctttgaggccttcgttggaaacgggatttcttcatattctgctagacagaagaattctcagtaacttccttgtgttgtgtgtattcaactgacagagttgaactttcatttagagagagcagatttgaaaaactgtttttgtggaatttgcaagtggagatttcaagcgctttggggccaaaggcagaaaaggaaatatcttcgtataaaaactagacagaatcattctcagaaactgctctgcgatgtgtgcgttcagctctcagagtttaacttttcttttcattcagcagtttggaaacactctgtttgtaaagtctgcacgtggatattttgaccacttagaggccttcgttggaaacgggtttttttcatgtaaggctagacagaagaattctcagtaacttccttgtgttgtgtgtattcaactcacagagttgaacgattctttacacagagcagacttgtaacactctttttgtggaatttgcaagtggagatttcagccgctttgaagtcaaaggtagaaaaggaaatatcttcctataaaaactacacagagtgattctcagaaactcctttgtgatgtgtgcgttcaactcacagagtttaacctttcttttcatagagcagataggaaacactctgtttgtaaagtctgcaagtggatattcagacctccttgaggccttcattggaaacgggatttcttcatattctgctagacagaagaattcccagtaacttccttgtgttgtgtgtgttcaactcacagagttgaactttcatttacacagagcagatttgaaacactctttttgtggaatttgcaagtggaggtttcaagcgctttgaggccaaaggcagaaaaggaaataccttcgtataaaaactagacagaatcattctcagaaactgctctgcgatgtgggcgttcaactctcagagtttaacttttcttttcattcagcagtttggaaacactctgtttgtaaagtctgcacgtggatattttgaccatttagaggccttcgttggaaacgggtttttttcttgtaaggctagacagaagaattcccagtaacttccttgtgtagtgtacattcaactcacagagttgaacgttcccttagacagagcagatttgaaacactctttttgtgcaactggcaagtggagatttcaagcgctttgaggtcaatggcagaaaaggaaatatcttcgtttcaaaactagacagaatcattcccacaaactgcgtagtgatgtgttcgttcaactcacagagtttaacctttctgttcatagaacagttaggaaacactctgtttgtaaagtctgcaagtggatattcagacctccttgaggccttcgttggaaacgggatttcttcatattctgctagacagaagaattctcagtaacttccttgtgttgtgtgtattcaactcacagagttgaacgatcctttacacagagcagacttgaaaccctctttttgtggaatttgcaagtggagatttcagacgctttgaggtcaatggtagaaaaggaaatatcttcttataaagactagacagaatgattctcagaaactcctttgtgatgtgtgtgttcaactcacagagtttaacctttcttttcatagagcagttaggaaacactctgtttgtaaagtctgcaagtggatattcagacctctttgaggccttcgttggaaacgggtttttttcatatagggctagacagaagaattctcagtaacttctttgtgttgtgtgtattcaactcacggagttgaacgatcctttacacagagcagacttgaaacactctttttgtggaatttgcaagtggagatttctgccgctttgaggtcaatggtagaataggaaatatcttcctatagaaaatacacagaatgtttctcagaaactcctttgagatgtgtttgttcaactcacagagtttaacctttcttttcatagagcagttaggaatcactctgtttgtaaagtctgcaagtggatattcagacctctttgaggccttcgttggaaacgggtttttttcatataaggctagacagaagaattcccagtaacttccttgtattgtgtgtgttcaactcacagagttgaactttcatttacacagagcagatttgaaacactctttttgtggaatttgcaaatggaggtttcaagcgctttgaggccaaaggcagaaaaggaaatatcttcgtataaaaactagacagaatcattctcagaaactactctgcgatgtgtgcgttcaactctcagagtttaacttttcttttcattcagcagtttggaaacactctgtttgtaaagtctgcacgtggatattttgaccacttagaggccttcgttggaaatgggtttttttcctgtaaggctagacagaagaattcccagtaactttccttgtgttgtgtacattcaactcacagagttgaaagttcccttagacacagcagatttgaaacactctttttgtgcaattggcaaatggagatttcaagcgctttaaggtcaatggcagaaaaggaaatatcttcgtttcaaaactagacagaatcattcccacaaactgcgttgtgatgtgttcgttcaactcacagactttaaactttcttttcatagagcagttaggaaacagtctgtttgtaaattctgtaagtggatattctgacatcttgtggccttcgttggaaacgggatttcttcatattctgctagacagaagaattctcagtaacttccttgtgttgtgtgtattcaacttacagagttgaatgatcctttacacagagcagacttgaaacactctatttgtagaatttgcaattggagatttcagccgctttgaggtcagtagtagaaaaggtaatatcttcgtagaaaaactaaacagaatgattctcataaactcctttgtgatgtgtgcattcaactcacagagtttcacctttcttttcatagagcagttaggaaacactctgtttgtaaagtctgcaagtggatattccgacctccttgaggccttccttggaaacgggatttcttcatattctgctagacagaagaattctcactaacttccttgtgttgtgtgtattcaactcacagagttgaacgatcctttacacagagcagacttgaaacactctttttgtggaatttgcaagtggagatttcagccgctttgaggtcaatggtagaaaaggaaatatcatcgtataaagactagacagaatgattctcagaaactcctttgtgatgtgtgcgttcaactcacagagtttaacttttcttttcatagaccagttaggaaacactctgtttgtaaagtctgcaagtggatattcagacctcctttgtggccttcgttggaaacgggatttcttcatattatgctagacagaagaattcccagtaacttccttgtgttgtgtgtgttcaactcacagtagttgaacttccatttacacagagcagatttgaaacactctttttgtggaatttgcaagtggagatttcaagcgctttgaggccaaaggcagaaaaggaaatatcttcctttcaaaactagacagaatcattctcagaaactgctctgtgatgtgtgcgttcaactctcagagtttaacttttcttttcattcagcagtttggaaacactctgtttgtaaagtctgcacgtggataatttgacaacttagaggccttctttggaaacgggtttttttcatgtaaggctagacagaagaattctcagtaacttccttgtgttgtgtgtattcaactcacagagttgaacgatcctttacacagaacagacttgtaacactctttttgtggaatttgcaagtggagatttcagccgctttgaagtcaaagttagaaaaggaaatatcttcctataaaaactagacagaatcattccgacaaactgcgttgtgatgtgttcgttcaactcacagagtttaacctttctgttcatagagcagttaggaaacactctgtttgtaaagtctgttaagtggatattctgacatcttgtggccttcgttggaaacgggatttcttcatattctgctagacagaagaattctcagaatcttcccttgtgttgtgtgtattcaactcacagagttgaacgatggtttacacagagcagagttgaaacactctttttgtggaatttgaaagtggagatttcagccgctttgaggtcaaaggtagaaaaggaaatatcttcgtataaaaactagacagaatgattctcagaaactcctttgtgatgtgtgcgttcaactcacagagtttaacttttcttttcatagagcagttaggaaacattctgtttgtaaagtctgcaagtggatattcagacctctttgtggccttcgttggaaacgggatttcttcatattatgctagacagaagaattctcagaatcttccttgtgttgtgtgtattcaactcacagagttgaacgatggtttacacagagcagatttgaaacactctttttgtggaatttgcaagtggagatttcagccgctttttggtcaatggtagaaaaggaaatatcttcgtataaaaactagacagaatgattctcagaaactcctttgtgatgtgtgcgttcaactcacagagtttaacctttcttttcatagagcagttaggagacactctgtttgtaaagtctgcaagtggatattgagacatccttgaggctttcgttggaaacgggatttcttcatattctgctagaaagaggaattcccagtaacttccttgtgttgtgtgtgttcaactcacagagttgaactttgatttacacagagcagatttgaaacactctttttgtggaatttgcaagtggagatttcaagcgctttgaggccaaaggcagaaaaggaaatatcttcgtataaaaactagacagaatcattttcagaaactgctctgcgatgtgtgcgttcaactctcagagtttaacttttcttttcattcagcagtgtggaaacactctgtttgtaaagtctgcacgtggatattttgaccacttagaggccttcgttggaaacgggtttttttcctgtaaggctagacagaagaattcccagtaacttccttgtgttgtgtgcattcaactcacagagttgaacgttcccttagacagagcagatttgaaacacactatttgtgcaatttgcaagtgtagatttcaagcgctttaaggtcaatggcagaaaaggaaatatcttcgtttcaaaactagacagaatcattcccacaaactgcgttgtgatgtgttcgttcaactcacagagtttaacctttcttttcatagagcagttaggaaacagtctgtttgtaaattatgtaagtggatattctgacatcttgtggccttcgttggaaacaggatttcttcatattctgctagacagaagaattctcagaatcttccttgtgttgtgtgtattcaactcacagagttgaaggatcctttacacagagcagatttgaaacactcttttggtggaatttgcaaatggagatttcagccgctttgaggtcaatggtagaaaaggaaatatcttcgtataaaaactagacagaatgattctcagaaacttctttgtgatgtgtgcgttcaactcacagagtttaacctttctattcatagagcagttagaaaacactctgtttgtaaactctgcaagtggatattcagacctctttgaggccttcgttggaaacgggatttcttcatactatgttagacagaagaattctcagtaacttccttgtgttgtgtgtattcaactcacagagttgaacgatcctttacacagagcagacttgaaacactctttttgtggaatttgcaagtggagatttcagccgctttgtggtcaatagtagaataggaaatatcttcctatagaaactagacagaaagattctcagaaactactttgtgatgtgtgcgttcaactcacagagttcaacctttcttttcatagagcagttaggaaacactctgtgtgtaaagtctacaagtggatattcagacctccttgaggccttcgttggaaacgggatttcttcatattctgctagacagaagaattcccagtaacttccttgtgttgtgtgtgttcaactcacagagttgaactttcatttacacagagcagatttgagacactctttttgtgaaatttgcaaatggagatttcaagcgctttgaggccaaaggcagaaaaggaaatatcttcgtataaaaactagacagaatcattctcagaaactgctctgcgatgtgtgcgttcaactctcagagtttaacttttcttttcattcagcagtttggaaacactctgtttgtaaagtctgcacgtgcataatttgaccacttagaggccttcgttggaaacgggtgtttttcatgtaaggctagacagaagaattcccagtaacttccttgtgttgtgtgcattccactcacagagatgaacgttcccttagacagaacagatttgaaacactctatttgtgcaatttgcaagtgtagatttcaagcgctttaaggtcaatggcagaaaaggaaatatcttcgtttcaaaactagacagaatcattcccacaaactgcgttgtgatgcgttcgttcaactcacagagtttaacctttcttttcatagagcagttaggaaacagtctgtttgtcaattctgtaagtggatattctgacatcttgtggccttcgttggaaacgggatttcttcatattctgctagacagaagaattctcagtaactgccttgtgttgtgtgtattcaactcacagagttgaacgatcgtttacacagagcagacttgaaacgctctttttgtggaacttgcaagtggagatttcagccgctttgaggtcaatggtagaataggaaatatcttcctatagaaactagacagaatgattctcagaaactcctttgtgatgtgtgcgttcaactcacagagtttaacctttcttttcatagagcagttaggaaacactctgtttgtaaagtctgcaagtggatattcagacctccttgaggccttcgttggaaacaggatttcttcatattatgctagacagaagaattctcagtaacttccttgtgttgtgtgtattcaattcacagagttgaacgatcctttacacagagcagacttgaaacactctttttgtgtaatttgcaagtggagatttcagccgctttgaggtcaatggtagaaaaggaaatatcttcgtataaaaactagacagaatgattctcagaaactcctttgtgatgtgtgcgttcaactcacagagtttaacctttcttttcatagagcagttaggaaacactctgtttgtaaagtctgcaagtggatattcagacctctttgaggccttcgttggaaacgggttttttacttataaggctaaacagaagaattcccagtaacttccttgtgttgtgtgtgttcaactcacagagttgaactttcatttacacagagcagatttgaaacactctttttgtggaatttgcaaatggagatttcaagcgctttgaggccaaatgcagaaaaggaaatatcttcgtataaaaattagacagataatcattctcagaaactgctctgcgatgtgtgcgttcaactctcagagtttaacttttcttttcattcagcagtttggaaacactctgtttgtaaagtctgcacgtggatattttgaccacttagaggccttcgttggaaacgggtttttttcctgtaaggctagacagaagaattcccagtaacttccttgtgttgtgtgcattcaactcacagagttgaacgttcccttagacagagcagatttgaaacactctatttgtgcaatttgcaagtgtagatttctagcgctttaaggtcaatgacagaaaaggaaatatcttcgtttcaaaactagacagaatcattcccacaaactgcgttgtgatgtgtttgttcaactcacagagtttaacctttcttttcatagagcagttagcaaacagtctgtttgtcaattctgtaagtggatattctgacatcttgtggccttcgttggaaacgggatttcttcatattctgctagacagaataattctctgtaacttccatgtgttgtgtgtattcaactcacagagttgaacgatcctttacacagagcagacttgaaacactctttttgtggaatttgcaagtggagatttcagccgctttgaggtcaatggtagaataggaaatatcttcctatagaaactagacagaatgattctcataaactcctttgtgatgtgtgcgttcaacacacagagtttaacctttctgttcatagagcagttaggaaacactctgtttgtaaagtctgtaagtggatattctgacaccttgtggccttcgttggaaacgggatttcttcatattctgctagacagaagaattctcagtaactttccttgtgttgtgtgtattcaactcacagagttgaacgatcctttacacagagcagacttgaaacactctttttgtggaatttgcaagtggagatttcagccgctttgagttcaatggtagaataggaaatatcttcctacagaaactagacagaatgattctcagaaactcctttgtgatgtgtgcgttcaactcacagagtttaacttttcttttcatagagcagttaggaaacactctgtttgtaaagtctgcaagtggatattcagacctctttgaggccttcgttggaaacgggttttcttcatattctgctagacagaagaattctcagtaacttccttgtgttgtgtgtattcaactgacagagttgaactttcatttagagagagcagatttgaaaccctgtttttgtggaatttgcaagtggagatttcaagcactttggggccaaaggcagaaaaggaaatatcttcgtataaaaactagacggaatcattctcagaaactgctctgggatgtgtgcgttcaactctcagagtttaacttttcttttcattcagcagtttggaaacactctgtttgtaaagtctgcacgtggataacttgaccacttggaggccttcgttggaaacgggtttttttcatgtaaggctagacagaagaattctcagtaacttccttgtgttgtgtgtattcaactcacagagttgaatgatcctttacacagaacagtcttgaaacactctttttgtggaatttgcaagtggagatttcagccgctttgaggtcaatggtacaataggaaataccttcctatagaaactagacagaatgattctcagaaactcctttgtgatttgtgcgtttaactcacagagtttaacctttcttttcatagagcagttaggaaacactctgtttgtaaagtctacaagtggatattcagacctctttgaggccttcgttggaaacgggtttttttcatataaggctagacagaagagttctcagtaacttccttgtgttgtgtgtattcaactcacagagttgaactttcatttagagagagcagatttgaaacactgtttttgtggaatttgcaattggagatttcaagtgctttggggccaaaggcagaaaaggaaatatcttcgtataaaaactagacagagaatcattatcagaaactgctgcgtgatgtgtgcgttcaactctcagaatttaacttttcttttcattcagcggtttggaaacactctgtttgtaaagtctgcacgtggatatattgaccacttagaggccttcgttggaaacgggtttttttcatgtaaggctagacagaagaattcccagcaacttccttgtgttgtgtgcattcaactcacagagttgaacgttcccttagacagaccagatttgaaacactctatttgtgcaatttgcaagtgtagatttcaagcgctttgaggtcaatggcagaaaaggaaatatcttcgtttcaaaactagacagaatcattcccacaaactgcgttgtgatgtgttcgttcaactcacagagttaaacttttcttttcatagaacagttaggaaacactctgtttgtaaagtctgtaagttgatattctgacatcttgtggccttattggtaacgggatttcttcatattctgctagacagaagaattctcagtaacttccttgtgttgtgtgtattcacctcacagatttgaacgatcctttacaaagagcagacttgaaacactcttttagtggaatttgcaagtggaggtttcagcctctttgaggtcaatggtagaataggaaatatcttcctatagaaactagacagaatgattctcacaaactcctttgtgatgtgtgcgttcaactcacagagtttaacctttgtttacatagagcagttaggaaacacactgtttgtaaagtctgcaagtggatattctgacctccttgaggccttcggtggaaacgggatttcttcatattctgctagacagaagaattctcagtaacttccttgtgttgtgtgtattcaactcaaagagttgaacgacactttacacagagcagacttgaaacactctttttgtggaatttgcaattggagatttcagccgctttgaggtcaatggtaggataggaaatatcttcctatagaaactagacagaatgattctcagaaactcctttgtgatgtgtgcgttcaactcacagagtttaacctttcttttcttagagcagttaggaaacactctgtttgtaaagtctgcaagtggatattcagacctccttgaggccttcgttggaaatgggatttcttcatattctgctagacagaagaaattcccagtaacttccttgtgttgtgtgtgttcaactcacagagttgaactttcatttacacagagcagatttgaaacactctttttgtggaatttgcaaatggagatttcaagcgctttgaggccaaaggcagaaaaggaaatatctttgtataaaaactagacagaatcattctcagaaactgctgcgtgatgtgtgcgttcaactctcagagtttaacttttcttttcattcagcggtttggaaacactctgtttgtaaagtctgcacgtggaaattttgaccacttaggggccttcgttggaaacgggtttttttcatgtaaggctagacagaagtattcccagtaacttccttgtgttgtgtgcattcaactcacagagttgaacgttcccttagacagagcaggtttgaaacactctatttgtgcaatttgcaagtgtagatttcaagcgctttaaggtcaatggcagaaaaggaaatatcttcgtttcaaaactagacagaatcattcccacaaactgcgttgtgatgtgttcgttcaactcacagagtttaacctttctgttcatagagcagttaggaaacactctgtttttaaagtctgccagtggatattcagacctctttgaggccttcgttggaaacgggatttcttcatattctgctagacagaagaattctcagtaacttccttgtgttgtgtgtattcaactcacagagttgaacgatcctttacacagaggagacttgaaacactctttttgtggaatttgcaagtggagatttcacccgctttgaggtcaatggtagaataggatatatcttcctatagaaaatagacagaatgattctcagaaactcttttgggatgtgtgcgttcaactcacagagtttaacctttctgttcatagagcagttaggaaacactctgtttgtaaagtctgcaagtggatattcagacctccttgagaccttcgttggaaacgggatttcttcatattccgctagacagaagaattctcagtaacttccttgtgttgtgtgtattcaactcacagagttgaacgatcctttacacagagcagacttgtaacactctttttgtggaatttgcaagtggagatttcaagcgctttgaggccaaatgcagaaaaggaaatatcttcgtttcaaaactagacagaatgattctcagaaactcctttgtgatgtgtgtgttcaactcacagagtttaacctttcttttcatagagcagttaggaaacactctgtttataaagtctgcaagtggatattcagacccctttgaggtccttcgttggaaacgggatttcttcatattatgctagacagaagaattctcagtaacttccttgtgttgtgtgtattccactcacagagttgaactttcatttatagagagcagatttgcaacactgtttttgtggaatttgcaagtggagatttcaagcgctttggggccaaaggcagaaaaggaaatatcttcgtataaaaactagacagaatcattctcagaaactgctctgcgatgtgtgcgttcaactctcagagtttgacttttcttttcattcagcagttttgaaacactctgtttgtaaagtctgcacgtggatattttgaccacttagaggccttcgttggaaacgggtttttttcctgtaaggctagacagaagaattcccagtaacttctttgtgttgtgtgcattcaactcacagagttgaacgttcctttagacagagcagatttgaaacactctttttgtgcaatttgcaagtggagatttcaagcgctttgaggtcaatggcagaaaaggaaataacttcgtttcaaaactagacagtatcattcccacaaactgcattgtgatgtgtgcgttcaactcacagagtttaacctttcttttcatagagccgtttgtaagcgctctgtttgtcaagtctgcaagtggatattctgacctctttgaggacttcgttggaaacaggatttcgtcctataatactagacagaagaattctcagtaacttccttgtgttgtgtgtattcaactcacagagttgaacgatcctttacacagagcagacttgaaacactctttttctggaatttgcaagtggagatttcagccgatttgaggtcaatggtagaataggaaatatcttcctatagatactagacagaatgattctcagaacctcctttgtgatgtgtgcgttcaactcacagagtttaacctttcttttcatagagcagttaggaaacactctgtttgtaaagtctgcaagtggatattcagacatccttgaggctttccttggaaacgggatttcttcatattctgctagaaagaagaattctcagaaacttcgttgtgttgtgtgttttcaaatcacagagttcaacgatcctttacacagagtagacttgaaacactctttttgtggaattggcagggtggagatttcagctgctttgaggtcaatggtagaaaaggaaatatcttcgtataaaaactagacagaatgattctcggaaactcctttgtgaagtgtgtgttcaactcacagagtttaacctttcttttcatagagcagttaggaaacactctgtttgtaaagtctgcaagaggatattcagacctctttgaggccttcgttggaaacgggtttttttcatataaggctagacagaagaattcccagtaacttccttgtgttgtgtgtgttcaactcacagagttgaactttcatttacacagagcagatttgaaacactctttttgtggaatttgcaagtggagatttcaagcgctttgaggccaaaggcagaaaaagaaatatcttcgtttcaaaactagacagaatgattctcagaaacttctttgtgatgagtgcgttcaactcacagattttaacctttcttttcatagagcagttaggaaacactctgtttgtaaagtctgcacgtggatattttgacctcttttaggccttccttggaaacgggtttttttcatgtaagcctagacagaagaattccgagtaacttccttgtgttgtctgcattcaactcacagagttgaacgttcccttagacagagcagatttgaaacactctatttgtgcaatttgcaagtgtagatttcaagctctttaaggtcaattgcagaaaaggaaatatcttcgtttcaaaactagacagaatcattcccacaaactgcgttgtgatgtgttcgttcaactcacagagtttaacctttctgttcatagagcagttaggaaacactctgtttgtaaagtctgtaagtggatattctgacatcttgtggccttcgtgggaaacgggatttcttcatattctgctagacagaagaattctcagaatcttccttgtgttgtgtgtattcaactcacacagttgaacgattgtttacacagagcagatttgaaacactctttttgtggaatttgcaagtggagatttcagccgctttgaggtcaatggtagaaaaggaaatatcttcatataaaaactagacagaatgattctcagaaactcctttgtgatgtgtgcgttcaactcacagagtttaccctttctgttcatagagcagttaggaaacactctgtttgtaaattctgcaagtggatattcagacctacttgaggtcttcggtggaaacgggatttcttcatattctgctagacagaagaattctcactaacttccttgtgttgtgtgtattcaactcacagagttgaacgatcctttacacagagcagacttgaaacactctttttgtggaatttgcaagtggagctttcagccgctttgaggtcaatagtagaaaaggaaatatcttcgtagaaaaactagacagaaagattctcagaaactcctttgtgatgtgtgcgttcaactcacagagtttaacctttcttttaatagagcagttgggaaacactctgtttgtatactctgcaagtggatattcagacctctttgaggccttcgttggaaacgggatttcttcatattctgctagacagaagaattctcagtaacttccttgtgttgtgtgtattcaactgacagagttgaactttcatttagacagagcagatttgaaacactctttttgtggaatttgcaagtggagatttcaagcgctttgaggccaaagggagaaaaggaaatatcttcgtataaaaactagacagaatcattctcagaaactgctctgcgatgcgtgcgttcagctctcagagtttaccttttcttttcattcagcagtttggaaacactctgtttgtaaagtctgcacgtggatattttgaacacttagaggccttcgttggaaaccggtttttgtcatgtaaggctagacagaagaattcctagtaacttccttgtgttgtgtacattcaactcacagagttgaacgttcccttagacagagcagatttgaaacactctttttgtgcaattggcaagtggtgatttcagccgctttgaggtcaatggtagaaaaggaaatatcttcgtattaaaactagacagaatcattcccacaaactgcgttgtgatgtgttcgttcaactcacagagtttaacctttctgttcatacggcagttaggaaacactctgtttgtaaagtctgtaagtggatattctgacattttgtggccttcgttggaaaggggatttcttcatattctgctagacagaagaattctcagaatcttccttgtgttgtgtgtattcaactcacagagttgaacgatggtttacacagagcagatttgaaacactcttttggttgaatttgcaagtggagatttcagccgctttgaggtcaatggtagaaaaggaaatatcttcgtataaaaactagacagaatgattctcagaaacttctttgtgatgtgtgcgttcaactcacagagtttaacctttcttttcatagagcagttaggaaacactctgtttgtaaagtctgcaagtggatattcagacctctttgaggccttcgttggaaacgggatttcttcatacaatgctagacagaagaattctcagtaacttccttgtgttgtgtgtattcaactcacagaattgaacgatcctttacacagagcagacttgaaacactctttttgtggaatttgcaagtggagatttcagccgctttgagttcaatggtagaataggaaatatcttcctatagaaactagacagaatgattctcagaaactcctttgtgatgtgtgcgttcaacacacagagtttaacttttcttttcatacagcagttaggaaacactctgtttgtaaagtctgcaagtggatattcagacctctttgaggccttcgttggaaacgggatttcttcatattatgctagacagaagaattctcagtaacttccttgtgttgtgtgtattcaactgacagagttgaactttcatttagagagagcagatttgaaacactgtttttttggaatttgcaagtggagatttcaagcgctttggggccaaaggcagaaaaggaaatatcttcgtataaaaactagacagaatcattctcagaaactgctctgcgatgtgtgcgttcaactctcagagtttaacttttcttttcattcagcagtttggaaacactctgtttgtaaagtctgcacgtggataatttgaccacttagaggccttcgttggaaacgggatttcttcatactgtgctagacagaagaattcccagtaacttccttgtgttgtgtgcattcaactcacagagttgaacgttcccttagacagagctgatttgaaacactctatttgtgcaatttgcaagtgtagatttgaagcgctttcaggtcaatggcagaaaaggaaatatcttcgtttcaaaactagacagaatcattcccacaaactgcgttgtgatgtgttcgttcaactcacagagtttaacctttcttttcatagagcagttaggaaacactctgtttgtaaagtctgcaagtggatattcagacctctttgaggccttcgttggaaacgggatttcttcatgttctgctagacagaagaattctcagaatcttcctagtgttgtgtgtattcaactcacagagttgaacgatggtttacacagagcagatttgaaacactctttttgtggaatttgcaagtggagatttcagccgctttgaggtcaatggtagaaaaggaaatatcttcgtataaaaactagacagaatgattctcagaaactcctttgtgatgtgtgcgttcaactcacagagtttaacctttcttttcatagagcagttaggaaacactcggtttgtaaagtctgcaagtggatattcagacctctttgaggccttcgttggaaacgggtttttttcatataaggctagacagaagaattctcagaatcttccttgtgtggtgtgtattcaactcacagagttgaacgatcctttacacagagcagacttgaaacactctttttgtggaatttgcaagtggagatttcagccgctttgaggtccatggtagaaaaggaaatatcttcgtataaaaactagacagaatgattctcagaaactcctttgtgatgtgtgcgttcaactcacagagtttaacctttctttttatagagcagttaggaaacactctgtttgtaaagtctgcaagtggatattcagacctccttgaggccttctttggaaacgggatttcttcctattatactagacagaagaattctcagtaacttctttgtgttgtgtgtattcaactgacagagttgaactttcatttagagagagcagatttggaacactgtttttgtggaatttgcaagtggagatttcaagcgctttggggccaaaggcagaaaaggatatatcttcgtataaaaactagacagaatcattctcagaaactgctgcgtgatgtgtgcgttcaactctcagagtttaacttttcttttcattcagcggtttggaaacactctgtttgtaaagtctgcacatggatattttgaccacttagaggccttcgttggaaacgggtttttttcatgtaaggctagacagacgaattcccagtaacttccttgtgttgtgtacattcaactcagagagttgaacgttccattagacagagcagatttgaaacactctttttgtgcaattggcaagtggagatttcaagcgctttaaggtcaatggcagaaaaggaaatatcttcgtttcaaaactagacagaatcattcccacaaactgcgttgtgatgtgttcgttcaactcacagagtttaacctttctgttcatagagcagttaggaaacactctatttgtaaagtctgtaagtggatattctgacatcttgtggccttcgttggaaacgggatttcttcatattctgctagacagaagaattctcagaatcttccttgtgttgtgtgtattcaactcacagagttgaacgatcctttacacagagcagacttgaaacactctttttgtggaatttgcaagtggagatttcagccgctttgaggtccatggtagaaaaggaaatatcttggtataaaaactagacagaatgattctcagaaactcctttgtgatgtgtgcgttcaactcacagagtttaacctttcttttcatagagcagttaggaaacactctgtttgtaaagtctgcaagtggatattcagacctccttgaggccttcgttggaaacgggatttcttcatattatgttagacagaagaattctcagtaacttcctggtgttgtgtgtattcaactcacagagttgaacgatcctttacacagagcagacttgaaacactctttttgtggaatttgcaagtggagatttcagccgctttgaggtcaatggtagaataggaagtatcttcctatagaaactagacacaatgattctcagaaactcctttgtgatgtgtgcattcaactcacagagtttaacttttcttttcatagagcagttaggaaacactctgtttgtaaagtctgcaagtggatattcagacctctttgacgccttcgttggaaacgggatttcttcatattctgctagacagaagaattcccagtaacttccttgtgatgtgtgtgttcaactcacagagttgaactttcatttacacagagcagatttgaaacactctttttgtggaatttgcaaatggagatttcaagcgctttgaggccaaaggcagaaaaggaaatatcttcgtataaaaactagacagaatcattctcagcaaactgctctgcgatgtgtgcgttcaactctcagagtttaacttttcttttcattcagcagtttggaaacactctgtttgtaaagtctgcacgtggataatttcaccacttagaggtcttcgttggaaacgggtttttttcatgtaaggatagacagaagaattcccagtaacttccttctgttgtgtacattcaactcacagagttgaacgttcccttagacagagcagatttgaaacactctttttgtgcaattggcaagtggagatttcaagcgctttaaggtcaatggcagaaaaggaaatatcttcgtttcaaaactagacagaatcattcccacaaactgcgttgtgatgtgttcgttacctcacagagtttaacctttcttttcatagagtagttaggaaacactcagtttgtaaagcctgcaagtggatattcagacctctttgaggccttcgttggaaacgggatttcttcatattatgctagacagaagaattctcagtaacttccttgtgttgtgtgtattcaactcatggagttgaacgatcctttacacagagcagacttgtaacactctttttgtggaatttgcaagtggagatttcagccactttgaagtcaaaggtagaaaaggaaataacttcctataaaaactagacagaatgattctcagaaactcctttgtgatgggtgcgttcaactcacagagtttaacctttcttttcatagagcagttaggaaacactctgtttgtaaagtctgcaagtggatattgagacatctttgaggccttcgttggaaacaggatttcttcatattctgatagacagaagaattctcagtaacttccttgtgttgtgtgtattcaactcacagagttgaacgatcctttacacagagcagtcttgaaacagtctttttgtggattttgcaagtgcagatttctgccgctttgaggtcaatggtagaataggaaatatcttcctatagaaactagacagaatgattctcagaaactcctttgtgatgtgtgcgttcaactcacagagttcaacctttcttttcatagagcagttgggaaacactctgtttgtaaagtctgcaagtggattttcagacttctttgaggccatcgttggaagcgggatttcttcatattctgctagacagaagaattctcagaatcttccttgtgttgtgtgtattcaactcacagagttgaacgatcctttacacagagcagacttgaaacactctttttgtggaatttgcaagtggagatttcaagcgctttgaggccaaaggcagaataggaaatatcttcgtataaaaactagacagaatcattctcagaaactgctctgtgatgtgtgcgttcaactctcagagtttaacttttcttttcattcagcagtttggaaacactctgtttgtaaagtctgcacgtggatattttgcccacttagaggccttcgttggaaacgggtttttttcatgtaagggtagacagaagaattcccagtaacttccttgtgttgtgtacattcaactcacagagttgaacgttcccttagacagagcagatttgaaacactctttttgtgcaattggcaaatggagatttcaagcgctttaagttcaatggcagaaaaggaaatatcttcgtttcaaaactagacagaatgattctgagaaactcctttgtgatgtgtgcgttcaactcacagagtttaacctttcttttcaaagagcagttaggaaacactctgtttgtaaactctgcaagtggatattcagacctccttgaggccttcgttggaaacggggtttcttcctattatgctagacagaagaattctcagtaacttccttgtgttgtgtgtattcaactcaaagagttgaacgatcctttacacagagcagagtagaaacactctttttgtggaatttgcaagtggagatttcagactctttgaggtcaatggtagaataggaaatatcttcctatagaaactagacagaatgattctcagaaacttctttgtgatgtgtgcgttcaactcacagagtttaacctttcttttaatagagcagttaggaaacactctgtttgtaaactctgcaagtggatattcagacctctttgaggccttcgttggaaacgggatttcttcatactatgctagacagaagaattctcagtaacttccttgtattgtgtgtattcaactcacagagttgaacgatcctttacacagagcagacttgtaacacactttttgtggaatttgcaagtggagatttcagccgctttgaagtcaaaggtagaaaaggaaatatcttcctataaaaactagacagaatgattctcatgaactccattgtgatgtgtgcgttcaactcacagagtttaacctttcttttcatagagcagttaggaaacactctgtttgtaaagtctgcaagtggatattcagacctccttgaggccttcgttggaaaagggatttcttcatattctgctagacagaagaattctcagtaacttccttgtgttgtgtgtattcaactgacagagctgaactttcatttagagagagcacatttgaaacactgtttttgtggaatttgcaagtggagatttcaaacgctttggggccaaaggcagaaaaggaaatatcttcgtataaaaactagacagaatcattctcagaaactgctctgcgatgtgtgcgttcaactctcagagtttaacttttcttttcattcagcagtttggaaacactatgtttgtaaagtctgcacgtggatattttgaccacttagaggccttcgttggaaacgggtttttttcttgtaaggctagacagaagaattcccagtaacttccttgtgttgtgtacattcaactcacagagttgaacgttcccttagacagagcagatttgaaacactctttttgtgcaattggcaaatggagatttcaagcgctttaagttcaatggcagaaaaggaaatatcttcgtttcaaaactagacagaatcattcccacaaactgcgttgtgatgtgttcgttcaactcacagagtttaacctttcttttcatagagcagttaggaaacagtctgtttgtcaattctgtaagtggatattctgacatcatgtggccttcgttggaaacgggatttcttcatattctgctagacagaagaattcccagtaacttccttgtgttgtgtgtattcaactcacagagttgaacgatcctttacacagagcagacttgtaacactctttttgtggaatttgcaagtggagatttcagccactttgaagtcaaaggtagaaaaggaaataacttcctataaaaactagacagaaatgattctcagaaactcctttgtgatgtgtgcgttcaactcacagagtttaacctttcttttcatagagcagttaggaaacactgtgtttgtaaagtctgcaagtggatattcagacctctttgaggccttcgttggaaacgggtttttttcatataaggctagacagaagaattctcagaatcttccttgtgttgtgtgtattcaactcacagagttgaacgatagtttacacagagcagatttgaaacactcatttggtggaatttgcaagtggagatttcagccgctttgaggtaaatggtagaaaaggaaatatcttcgtataacaactagacagaatgattctcagaaactcctttgtgatgtgtgcgttcaactcacagagtttaacctgtcttttcatagagcagttaggaaacactctgtttgtaaagtctgcaagtggatattcagacatccttgaggctttcgttggaaacgggatttcttcatattctgctagaaagaagaattcccagtaacttcccttgtgttgtgtgtgttcaactcacagagttgaactttcatttagacagagcagatttgaaacactctttttgtggaatttgcaaatggagatttcaagcgctttgaggccaaaggcagaaaaggaaatatcttcgtataaaaactagacagaatcattctcagaaactgctgcgagatgtgtgcgttcaactctcagagtttaacttttcttttcattcagcggtttggaaacactgtgtttgtaaagtctgcacgtggatattttgaccacttagaggccttcgttggaaacgggtttttttcatgtaaggctagacagaagaattctcagtaacttccttgtgttgtgtgtattcaactcacagagttgaacgatcctttacacagagcagacttgaaacactctttttgtggaatttccaagtggagatttcagccgctttgaggtcaatggtagaaaaggaaatatcttcgtataaagactagacagaatgattctcagaaactcctttgtgatgtgtgcgttcaactcacagagtttaacttttcttttcatagagcagttaggaaacactctgtttgtaaagtctgcaagtggatattcagacctctttgaggccttcgttggaaacgagatttcttcatattctgctagacagaagaattctcagtaacttccttgtgttgtgtgtattcaactgacagagttaaactttcatttagagagagcagatttgaaacactgtttttgtggaatttgcaagtggagatttcaagcgctttgtggccaaaggtagaaaaggaaatatcttcgtataaaaactagacagaatcattctcagaaactgctctgcgatgtgtgcgttcaactctcagagtttaactttgcttttcattcagcagtttggaaacactctgtttgtaaagtctgcacgtggataacttgaccacttagaggccttcgttggaaacgggtttttttcatgtaaggctagacagaataattctcagtaacttccttgtgttgtgtgtattcaactcacagagttgaacgatcctttacagagagcagaattgaaacactctttttgtggaatttgcaagtggagatttcagccgctttgaggtcaatggtagaataggaaatatcttcctatagaaaatagacagaatgattctcataaactcctttgtgatgtgtgcgttcaactcacagggtttaacctttcttttcatagagcagttaggaaacactctgtttgtaaagtctgcaagtggatattcagacctactttgaggccttcgatggaaacgggattttttcatattctgctagacagaagaattcccagtaacttccttgtgttgtgtgtgttcaactcacagagttgaactttcatttacacagagcagattggaaacattctttttgtggaatttgcaagtggagatttcaagcgctttgaggtcaaaggcagaaaaggaaatatcttcgtataaaaactagacagaatcattctcagaaactgctctgcgatgtgtgcgttcaactctcagagtttaacttttcttttcattcagcattttggaaacactctgtttgtaaagtctgcacgtggatattttgaccacttagaggccttcgttggaaacgggtttctttcctgtaaggctagacagaagaattcgcagtaacttcccttgtgttgtgtacattcaactcacagagttgaacgttcccttagacagagcagatttgaaacagtctttttgtgcaattggcaagtggagatttcaagcgctttaagttcaatggcagaaaaggaaatatcttcgtttcaaaactagacagaatcattcccacaaactgcgttgtgatgtgttggttcatctcacagagtttaacctttcttttcatagagcagttaggaaacactctgtttgtaaattctgtaagtggatattctgacatcttgtggccttcgttggaaacgggatttcttcaaattctgctagacagaagaagtctcagtaacttccttgtgttgtgtgtattcaactcacagagttgaacgatactttacacagagcagacttgaaacactctttttgtggaatttgcaactggagatttcagccgctttgaggtcaatggtagaataggaaatatcttcctatagaaactagacagaatgattctcagaaactcctttgtgatgtgtgcgttcaactcacagagtttaacttttcttttcatagagcagttaggaaacactctgtttctaaggtctgcaagtggatattcagacctctttgacgccttcgttggaaacgggatttcttcatattctgctagacagaagaattctcagtaacttccttgttttgtgtgtattcaactcacagagttgaaccatcctttacacagagcagacttgaaacactctttttgtggaatttgcaagtggagatttcagccgctttgagctcaatggtagaataggaaatatcttcctatagaaactagacagaatgattctcataaactcctttgtgatgtgtgcgttcaaatcacagagtttaacctttcttttcatagagcagttagtaaatactctgtttataaagtctgcaagtggatattcagacccctttgaggccttcgttggaaacgggatttcttcatattatgctagacagaagaattcccagtaccttccttgtgttgtgtgtgttcaactcacagagttgaactttcatttacacagagcagatttgaaacactctttttgtggaatttgcaggtggagatttcaagcgctttgaggccaaaggcagaaaaggaaatatcttcgtataaaaactagacagaatcattctcagaaactgctgcgtgatgtgtgcgttcaactctcagagtttaacttttcttttcattcagcggtttggaaacactctgtttgtaaagtctgcacgtggacattttgaccacttagaggccttcgttggaaacgggtttttttcatgtatggctagacagaagaattcccagtaacttccttgtgttgtgtacattcaactcacagagttgaacgttcccttagacagagcagatttgaaacactctttttgtgcaattggcaagtggtgatttcagccgctttgaggtcaatggtagaaaaggaaatatcttcgtataaaaactagacagaatgattctcagaaacttcattgtgacgtgtgcgttcaactcacagagtttaacctttcttttcatagagcagttaggaaacactctgtttgtaaagtctgcaagtggatattcggacctctttgaggtcttcgttggaaacgggatttcttcatactgtgctagacagaagaattctcagtaacttccttgtgttgtgtgtattgaactcgcagagttgtacgatcctttacacagagcagacttgaaacactctttttgtggaatttgcaagtggagatttcagccgctttgaggtcaatagtagaaaaggaaatatcttcgtagaaaaactagacagaatgattctcagaaactcctttgtgatgtgtgtgttcaactcacagagtttaacctttcttttcatggagcagttaggaaacactctgtttgtaaagtctgcaagaggatattcagacctctttgaagccttcgttggaaacgggtttttttcatataaggctagacagaagaattctcagtaacttccttgtgttgtgtgtattcaactcacagagttgaacgatcctttacagagagcagacttgaaacactctttttgtggaatttgcaaggggagatttcagccgctttgaggtcaatagtagaaaaggaaatatcttcgtataaagactagacagaatcattctcagaaaatgctctgtgatgtgtgcgttcaactctcagagtttaacttttcttttcattcagcactttggaaacactctgtttgtaaagtctgcacgaggatattttgaccacttagaggtctttgttggaaacgggtttttttcacgtaaggctagacagaagaattcccagtaactttccttgtgttgtgtacattcaactcacagagttgaacgttcccttagacagagcagatttgaaacactctttttgtgcaattggcaagtggagatttcaagggctttaaggtcaatggcagaaaaggaaatatcttcgtttcaaaactagacagaatcattcccacaaactgcgttgtgatgtgttcgttcaactcacagagtttaacctttctgttcatagagcagttaggaaacactctgtttgtaaagtctgcaagtggatattcagacttccttgaggccttcgttggaaacgggatttcttcatattctgctagacagaagaattctcaggaacttccttgtgttgtgtgtattcaactcacagagttgaacgatcctttacacagagcagacttgaaacactctttttgtggaatttgcaagtggagatttcagccgctttgaggtcaatggtagaaaaggaaatatcttcctatagaaactagacagaatgattctcagcaaacttctttgtgatgtgtgcgttcaactcacagagtttaacctttcttttcatagagcagttaggaaacactctgtttgtaaactctgcaagtggatattcagacctctttgaggccttcgttggaaacgggatttcttcatactatgctagacagaagaattctcagtaactcccttgtgttgtgtgtattcaactcacagagttgaacgatcctttacacagagcagacttgaaacactctttttgtggaatttgcaagtggagatttcagccgctttgagttcaatggtagaataggaaatatcttcctatagaaactagacagaatgattctcagaaactcctttgtgatgtgtgcgttcaactcacagaggttaacctttcttttcatagagcagttaggaaacactctgtttgtaaagtctgcaagtggatatgcagacctccttgaggcctttgttggaacgggatttcttcatattatgctatacagaagaattctcagaaacttccttgtgttgtgtgtattcaactcacagagttgaacgatcctttacacagagcattcttgaaacactcttcttgtggaatttgcaagtggagatttcagccgctttgaggtcaatggtagaataggaaatatcttcctatagaaactagacagaatcattctcagaaactgctctgtgatgtgtgcgttcaactctcagagtttaacttttcttttcattcagcagtttggaaacactctgttcgtaaagtctgcacgtggataatttgaccacttagaggccttcgttggaaacgggtttttttcatgtaaggctagacagaagaattcccagtaacttccttgtgttgtgtacattcaactcacagagttgaacgttcccttagacagagcagatttgaaacactctttttgtgcaattggcaagtggagatttcaagagctttaaggtcaatggcagaaaaggaaatatcttcgtttcaaaactagacagaatgattctcagaaactcctttgtgatgtgtgcgttcaactcacagagtttaacctttctgttcatagagcagttaggaaacactctgtttgtaaagtctgtaagtggatattctgacatcttgtggccttcgttcgaaacgggatttcttcatattctgctagacagaagaattctcagtaacttccttgtgttgtgtgtgttcaactcacagagttgaacgatcctttacacagagcagacttgtcacactctttttgtggaatttgcaagtggagatttcagccgctttgaagtcaaaggtagaaaaggaaatatcttcctataaaaactagacagaatgattctcagaaactcctttgtgatgtctgcgttcaactcacagagtttaacctttcttttcatagagaagttaggaaacactctgtttgtaaagtctgcaagtggatattcagacctctttgaggccttcgttggaaacgggtttttttcatataaggctagacagaagaattctcagaaacttccttgtgttgtgtgtattcaactcacagagttgaacgatcatttacacagagcagacttgaaacacactttttttggtattttcaatgggagatttcagccgcttttaggtcaatggtagaaaaggaaatatcttcgtataaagactagacagaatgattctcagaaactcctttgtgatgtgtgcgttcaactcacagagtttaacctttcttttcatagagcagttaggaaacgctctgtttgtaaagtctgcaaggggatattcagacctctctgaggccttcgttggaaatgggatttcttcatattatgctagacagaagaattctcagtaacttccttgtgttgtgtgtattcaactgacagagttgaactttcatttagagagagcagatttgaaacactgtttttgtggaatttgcaagtggagatttcaagcgctttggggccaaagccagaaaaggaaatatcttcgtataaaaactagacagaatcattctcagaaactgctctgcgatgtgtgcgttcaactctcagagtttaactattcttttcattcagcagtttggaaacaatctgtttgtaaagtctgcacgtggataacttgaccacttagaggccttcgttggaaacgggtttttttcatgtaaggctagacagaagaattctcagaaacttccttgtgttgtgtgttttcaactcacagagttcaacgatcctttacacagagtagacttgaaacactgtttttgtggaattggcaagtggagatttcagccgctttgaggtcaatggtagaataggaaatatcttcgtataaaaactagacagagaatgattctcagaaactcctttgtgatgtgtgtgttcatctcacagagtttaacctttcttttcatagagcagttagtaaacactctgtttataaagtctgcaagtggatattcagacccctttgaggccttcgttggaaacgggatttcttcatattatgctagacagaagaattcccagtaacttccttgtgttgtgtgtgttcaactcacagagttgaactttcatttacacagagcagatttgaaacactctttttgtggaatttgcaagtggagatttcaagcgctttgaggccaagggcagaaaaggaaatatcttcgtataaaaactagacagaatcattctcagaaactgctctgcgatgtgtgcgttcaactctcagagtttaacttttcttttcattcagcagtttggaaacactctgtttgtaaagtctgcacgtgcataatttgaccacttagaggccttcgttggaaacgggtttttttcatgtaaggctagacagaagaattctcagtaacatccttgtgttgtgtgtattcaactcacagagttgaacgatcctttacacagagcagacttgaaacactctttttgtggaatttgcaagtagagatttcagccgctttgaggtcaatggtagaataggaaatatcttcctatagaaactagacagagtgattctcagaaactcctttgggatgtctgcgttcaactcacagagtttaacctttcttttcatagagcagttaggaaacactctgtttgaaaagtctgcaagtggatattcagacctccttgaggccttcgttggaaacgggatttcttcatattctgctatacagaagaattctcagcaacttccttgtgttgtgtgtattcaactcacagagttgaacgatcgtttacacagagcagacttgagacactctttttgtggaatttgcaagtggagatttcagcctctttgaggtcaatggtagaaaaggaaatatcttcatgtaaaaactagacagaatcattctcagaaactgctgcgtgatgtgtgcgttcaactctcagagtttaacttttcttttcattcagcggtttggaaacactctgtttgtaaagtctgcacgtggatattttgaccacttagaggccttcgttggaaacggatttttttcatgtaaggctagacagaagaattcccagtaacttccttgtgttgtgtacattcaactcacagagttgaacgttcccttagacagagcagatttgaaacactctttttgtgcaattggcaaacggagatttcaagcgctttaagttcaatggcagaaaaggaaatatcttcgtttcaaaactagacagaatcattcccacaaactgcgttgtgatgtgttcgttcaactcacagagtttaacctttcttttcatatagcagttaggaaacactctgtttgtaaagtctgcaagtggatattcagacctctttgaggccctcgttggaaacgggatttcttcatattatgctagacagaagaattctcagtaacttccttgtgttgtgtgtattcaactcacggagttgaacgatcctttacacagagcagacttgtaacactctttttgtggaatttgcaagtggagatttcagccgctttgacgtcaatggtagaaaaggaaataccttcgaataaaaactagacagaatgattctcagaaactcctttgtgatgtgcgcgttcaactcacagagtttaacctttcttttcatagagcagttaggaaacactctgtttgtaaagtctgcaagtggatattcagacatccttgaggctttcgttggaaacgggatttcttcatattctgctagaaagaagaattctcagtaacttccttgtgttgtgtgtattcaactcacagagttgaacgatcctttacacagagcagacttgaaacactctttttgtggaatttgcaagtggagatttcaagcgctttgaagccaaaggcagaaaaggaaatatcttcgtataaaaactagacagaatgattctcagaaactcctttgtgatgtgtgcgttcaagtcacagagtttaacctttcttttcatagagcagttaggaaacactctgtttgtaaagtctgcaagtggatattcagacctctttgaggccttcgttggaaacgggatttcttcatattctgctagacaaaagaatttctcagtaacttcccttgtgttgtgtgtattcaactgacagagttgaactttcatttagagagagcagatttgaaacactgtttttgtggaatttgcaaatggagatttcaagcgctttggggccaaaggcagaaaaggaaatatcttcgtataaaaactagacagaatcattctcagaaactgctgcgtgatgtgtgcgttcaactctcagagtttaacttttcttttcattcagcggtttggaaacactctctttgtaaagtctgcacgtggatattttgaccacttagaggccttcgttggaaacgggttttcttcatgtaaggctagacagaagaattcccagtaacttccttgtgttttgtacattcaacccacagagttgaacgtttccttagacagagcagatttgaaacactctttttgtgcaattggcaattggtgatttcagccgctttcaggtcaaaggtagaaaaggaaatatcttcctataaaaactagacagaatcattcccacaaactgcgttgtgatgtgttcgttcaaatcacagagtttaacctttctgttcatagagcagttaggaaacactctgtttgtaaagtctgcaagtagatattgagacctcctagaggccttcgttggaaacgggatttcttcatattctgctagacagaagaattctcagtaactcctttgtgttgtgtatattcaactcacagagttgaacgatcctttacacagagcagacttgaaacactctttttgtggaatttgcaagtggagatttcagcctctttgaggtcaatggtagaataggaaatatcttcctatagaaactagacagaatgattctcagaaactcctttgtgatgtgtgcgttcaactcacagagtttaacctttcttttcatagagcagttaggaaacactctgtttgtaaagtctgcaagtggatattcagacctccttgaggccttctttggagacgggatttcttcatattatgctagacagaagaattcccagtaacttccttgtgttgtgtgtgttcaactcacagagttgaactttgatttacacagagcagatttgaaacactctttttgtggaatttgcaagtggagatttcaagcgctttgaggccaaaggcagaaaaggaaatatcttcgtataaaaactagacagcatcattctcagaaactgctctgcgatgtgtgcgttcaactctcagagtttaacttttcttttcattcagcagtttggaaaccctctgtttgtaaagtctgcacgtggatattttgaccatttagaggctttcgttggaaacgggtttttttcttgtaaggctagacagaagaattcccagtaacttcccttgtgttgtgtgcattcaactcacagagttgaacgttcccttagacagagcagatttgaaacactctatttgtgcaatttgcaagtgtagatttcaagcgctttaaggtcaatggcagaaaaggaaatatcttcgtttgaaaactagacagaatgattcccacaaactgcgttgtgatgtgttcgttcaactcacagtagtttaacctttctgttcatagagcagttaggaaacactctgtttgtaaagtctgtaagtggatattctgacatcttgtggccttcgttgggaacgggatttcttcatattctgctagacagaagaattctcagtaacttccttgtgttgtgtgtattcaactcacacagttgaacgatcctttacacatagcagacttgtaacactctttttgtggaatttgcaagtggagattcctgccgctttgaagtcaaatgtagaaaaggaaatatcttcctataaaaactagacagaatgattctcagaaactcctttgtgatgtgtgcgttcaactcacagagtttaaccttacttttcatagagcagttaggaaacactctgtttgtaaagtctgcaagtggatatacagacatctttgaggccttcgttggaaacgggatttcttcatgttctgctagacagaagaattctcagtaacttccgcgtgttgtgtgtattgaactcacagagttgaacgatcctttacacagagcagagttgaaacactctttttgtggaatttgcaagtggagatttcagccgctttgaggtcaatggtagaaaaggaaatatcttcctataaaaactagacagaatgattctcagaaactcctttgtgatgtgtgcgttcaactcacagagttcaaactttcttttcatagagcagttgggaaacactctgtttgtaaagtctgcaagtggatattcagacttctttgaggacttcgttggaagcgggatttcttcgtattctgctagacagaaaaattcccagtaacttccttgtgttgtgagtgttcaactcacagagttgaactttcatttacacagagcagatttgaaacactctttttgtggaatttgcaagtggagatttcaagcgctttgaggccaaaggcagaaaaggaaatatcttcttataaaaactagacagaatcattctcagaaactgtggcgtgatgtgtgcgttcaactctcagagtttaacttttcttttcattcagcggtttggaaacactctgtttgtaaagtctgcacgtggatattttgaccacttagaggccttcgttggaaacggggttttttcatattctgctagacagaagaattcccagtaacttccttgtgttgtgtacattcaactcacagagttgaacgttcccttagacagagcagatttgaaacactctttttgtgcaattggcaaatggagatttcaagcgctttaaggtcaatggcaggaaaggaaatatcttcgtttcaaaactagacagaatcattcccacaaactgcgttgttatgtgttcgttcaactcacagtagtttaacctttcttttcatagagcagttaggaaacagtctgtttgtaaattctgtaagtggatattctgacatcttgtggccttcgttggaaacgggatttcttcatattctgctagacagaagaattctcagtaaattcctggtgttgtgtgtattcaactcacagagttgaacgatcctttacacagagcagacttgaaacactctttttgtggaatttgcaagtggagatttcagccgctttgaggtcaattgtagaaaaggaaatatcttcgtatagaaactagacagaatgattctcagaaacttctttgtgatgtgtgcgttcaactcacagagtttaacctttcttttcatacagcagttaggaaacactctgtttgtaaactctgcaagtggatattcagacctctttgaggccttcgttggaaacgggatttcttcatactatgctagacagaagaattctcagtaacttccttgtgttgtgtgtattcaactcacagagttgaacgatgatttacacagagcagacttgaaacactctttttgtggaatttgcaactggagatttcagccgctgtgtggtcaatggtagaataggaaatatcttcctatagaaactagacagaatgattctcagaaactgctttgtgctctgtgcgttcaactcacagagtttaacctttcttttcatagagcagttaggaaacactctgtttgtaaagtctgcaagtggatattctgacctctttggggccttcgttggaaaagggatttcttcatattatgctagacagaagaattcccagtaacttccttgtgttgtgtgtgttcaactcacagagttgaactttcatttacacagagcagatttgaaacactctttttttggaatttgcaagtggagatttcaagcgctgtgaggccaaaggcagaaaaggaaatatcttcgtataaaaactagacagaatcattctcagaaactactctgcgatgtgtgcgttcaactctcagagtttaacttttcttttcattcagcagtttggaaacactctgtttgtaaagtctgcacgtggatattttgaccacttagaggccttcgttggaaacgggtttttttcctgtaaggctagacagaagaattcccagtaacttccttgtgttgtgtacattcaactcacagagttgaacgttcccttagacagagcagatttgaaacactctttttgtgcaattggcaaatggagatttcaagcgctttaaggtcaatggcaggaaaggaaatatcttcgtttcaaaactagacagaatcattcccacaaactgcgttgtgatgtgttcgttcaactcacagagtttaacctttctgttcatagagcagttaggaaacactctgtttgcaaagtctgcaagtggatattcagacctccttgaggccttcgttggaaacgggatttcttcatattctgctagacagaagaattctcagaatcttccttgtgttgtgtgtattcaactcacagagttgaacgatggtttacacagagcagatttgaaacactctatttgtggaatttgcaagtggagatttcagccgctttgaggtccatggtagaaaaggtaatatcttcgtataaaaactagacagaatgattctcagaaactcccttgtgatgtgtgcgttcaactcacagagtttaacctttcttttcatagagcagttaggaaacactctgtttgtaaagtctgcaagtggatattcagacctccttgaggccttcgttggaaacgggatttcttcatatgatgctagacagaagaattctcagtaacttccttgtgttgtgtgtattcaactcacagagttgaacgatcctttacacagagcagacttgaaacactctatttgtggaatttgcaagtggagatttcagccgctttgaggtcaatggtagtataggaaatatcttcctatagaaactagacagaatgattctcagaaactcctttgtgatgtgtgcagttcaactcacagagtttaacctttcttttcatagagcagttaggaaacactctgtttgtaaagtctgcaagtggatattcagacctccttgaggccttcgttggaaacgggatttcttcctattatgctagacagaagaattcccagtaacttccttgtgttatgtgtgttcaactcacagagttgaactttcatttacacagagcagatttgaaacactctttttgtggaatttgcaagtggagatttcaagcgctttgaggccaaaggcagaaaaggaaatatcttcgtataaaaactagacagaatcattctcagaaactgctctgcgatgtgtgcgttcaactctcagagtttaacttttcttttcattcagaagtttggaaacactctgtttgtaaagactgcacgtggataacttgaccacttagaggccttcgttggaaacgggtttttttcatataaggctagacagaagtattcccagtaacttccttgtgttgtgtgcattcaactcacagagatgaacgttcccttagacagagcagatttgaaacactctatttgtgcaatttgcaagtgtagatttcaagcgctttaaggtcaatggcagaaaaggaaatatcttcgtttcaaaactagacagaatcattcccacaaactgcgttgtgatgtgttcgttcaactcacagagtttaacctttccgttcatagagcagttaggaaacactctgtttgtaaagtctgtaagtggatattctgacatcttctggccttcgttggaaacgggatttcttcatattctgctagacagaagaattctcagaatcttccttgtgttgtgtgtattcaactcacagagttgaacgatggtttacacacagcagatttgaaacactctttttgtggaatttgcaagtggagatttcagcctctttgaggtcaatggtagaaaaggaaatatcttcgtataaaaactagacagaatgattctcagaaacttctttgtgatgtgtgcgttcaactcacagagtttaacctttcttttcatagagcagttaggaaacactctgtttgtaaagtctgcaagtggatattcagacctctttgaggccttcgttggaaacgggatttcttcatgctatgctagacagaagaattctcagtaacttccttgtgttgtgtgtattcaactcacagagttgaacgatcctttacacggagcatacttgaaacactcttgttgtggaatttgcaagtggagatttcagcctctttgaggtcaatggtagaataggaaatatcttcctatagaaactagacagaatgattctcagaaactcctttgtgatgtgtgcgttcaactcacagagtttaacttttcttttcatagagcagttaggaaacactctgtttgtaaggtctgcaagtggatattcagacctctttgaggccttcgttggaaacgggatttcttcatattatgctagacagaagaattctcagtaacttccttgtgttgtgtgtattcaactgacagagttgaactttcatttagagagagcagatttgaaacactgtttttgtggaatttgcaagtggagatttcaagcgctttggggccaaaggctgaaaagggaatatcttcgtataaaaactagacagaatcattctcagaaactgctgcgtgatgtgtgcgttcaactctcagagtttaacttttcttttcattcagcggtttggaaacactctgtttgtaaagtctgcacgtggatattttgaccacttagaggccttcgttggaaacgggtttttttcatgtaaggctagagagaagaattcccagtaacttcccttgtgttgtgtacattcaactcacagagttgaacgtttccttagacacagcagatttgaaacactctttttgtgcaattggcaagtggtgatttcagccgctttgaggtcaatggtataaaaggaaatatcttcatataaaaactagacagaatcattcccacaaactgcgttgtgatgtgtttgttcaactcacagagtttaacctttcttttcatagagcagttaggaaacagtctgtttgtcaattctgtaagtggatattctgacatcttgtggccttcgttggaaacgggatttcttcatattctgctagacagaagaattctcagtaacttccttgtgttgtgtgtattcaactcacagaattgaacgatcctttacacagagcagacttgaaaaactctttttgtggaatttgcaagtggagatttcagccgctttgaggtcaatggtagaataggaaatatcttcctatagaaactagacagaatcattcccacaaactgcgttgtgatgtgttcgttcaactcacagagtttaacctttctgttcatagagcagttaggaaacactctctttgtaaagtccgtaagtggatattctgacatcttctggccttcgttggaaacgggatttcttcatattccgctagacagaagaattctcagtaacttccttgtgttgtgtgtattcaactcacagagttgaacgatcctttacacagagcatagttgaaacactctttttgtggaatttgcaagtggagatttcagccgctttgaggtcaatggtagaaaaggaaatatcttcgtataaagactagacagaatgattctcagaaacccctttgtgatgtgtacgttcaactcacagagtttaacctttcttttcatagagcagttaggaaacactctgtttgtaaagtctgcaagtggatattcagacctctttgaggccttcgttggaaacgggatttcttcatattctgctagacagagaattcccagtaacttccttgtgttgtgtgtgttcaactcacagagttgaactttcatttacacagagcagatttgaaacactctttttgtggaatttgcaggtggagatttcaagcgctttggggccaaaggcagaaaaggaaatatcttcgtataaaaactagacagaatcattctcagaaactactctgtgatgtgtgcgttcaactctcagagtttaacttttcttttcattcagcagtttggaaacactctgtttgtaaagtctgcacgtggatattttgaccacttagaggccttcgttggaaacgggtttttttcatttaaggctagacagaagaattcccagtaacttccttgtgttgtgtatattcaactcacagagttgaacgatcccttagacagagcagatttgaaacactctttttgtgcaattggcaagtggagacttcaagcgctttaaggtcaatggcagaaaaggaaatatcttcgtttcaaaactagacagaatcattcccaaaaactgcgttgtgatgtgttcgttcatctcagagagtttaacctttcttttcatagagcagttaggaaacagtctgtttgtaaattctgtaagtggatattctgacatcttgtggccttcgttggaaacgggatttcttcatattctgctagacagaaaggaattctcagtaacttccttgtgttgtgtttattcaactcacagagttgaatgatcctttacacagagcagacttgaaacactctttttgtggaatttgcaagtggagatttcagccgctttgaggtcaatggtagaaaagtaaatatcttcgtataaagactagacagaatgattctcagaaactcctttgtgatgtgtgcgttcaactcacagagtttaacctttcttttcatagagcagttaggaaacactctgtttgtaaagtctgcaagtggatattcagacctctttgaggctttccttggaaacgggagttcttcatattctgctagacagaagaattctcagtaacttccttgtgttgtgtgtattcaactcacagagttgaacgatcctttacacagagcagacttgaaacactgtttttgtggaatttgcaagtggagatttcggccgcgttgaggtcaaaggtagaaaagggaatatcttcgtaaagaaactagacagaatgattctcagaaactcctttgagatgtgtgtgttcaactcacagagtttaacctttcttttcatagagcagttaggaatcactctgtttgtaaagtctgcaggtggatattcagacctctttgaggccttcgttggaaacgggtttttttcatataaggctagacagaagaattctcagtaacttccttgtgttgtgtgtattcaactgacagagttgaactttcatttagagagagcagatttgaaacactgtttttgtggaatttgcaagtggagatttcaagcgctttggggccaaaggcagaaaaggaaatatcttcgtataaaaacgagacagaatcattctcagaaactgctctgcgatgtgtgcgttcaactctcagtagtttaacttttcttttcattcagcagtttggaaacactctgtttgcaaagtctgcacgtggatattttgaccacttagaggccttcgttggaaacgggtttttttcatgtaaggctagacagaagaattctcagtaacttccttgtgttgtgtgtattcaactcacagagttgaacgatcctttacacagagcctacttgaaacactgtttttgtggaatttgcaagtggagatttcagccgctttgaggtcaatggtagaaaaggaaatatcttcctatagaaactagacagaatgattctcagaaactcctttgtgatgtgtgcgttcaactcacggagtttaacctttcttttcatagagcagttaggaaacactctgtttgtaaagtctgcaagtggatattcagacctctttgaggccttcgttggaaacgggatttcttcatattctgatagacagaagaattcccagtaacttccttgtgttgtgtgtgttcaactcacagagttgaactttgatttacacagagtagatttgaaacactctttttgtggaatttgcaagtggagatttcaagcgctttgaggccaaaggcagaaaaggaaatatcttcgtataaaaactagacagaatcattctcagaaactgctgcgtgatgtgtgcgttcaactctcacagtttaacttttcttttcattcagcggtttggaaacactctgtttgtaaagtctgcacgtggatattttgaccacttagaggccttcgttagaaactggtttttttcatgtaaggctagacagaagaattcccagtaacttccttgtgttgtgtgcattcaactcacagagatgaacgttcgcttggacagagcagatttgaaacactctatttgtgcaatttgcaagtgtagatttcaagggctttaaggtcaatggcagaaaaggaaatatcttcgttccaaaactagacagaatcattcccactaactgcgttgtgatgtgttcgttcatctcacagagtttaacctttcttttcgtagagcagttaggaaacagtctgtttgtaaattctgtaagtggatattctgacatcttgtggccttcgttggaaacgggatttcttcatattctgctagacagaagaattctcagtaacttcattgtgttgtgtgtattcaactcacagacttcaacgatcctttacacagagcagacttgaaacactctttttctggaatttgcaagtggagatttcagccgctttgaggtcaatggtagaataggaaatatcttcctatagaaactagacagaatgattctcagaaactcctttgtgatgtgtgcgttcaactcacagagttcaacctttcttttcatagagcagttggaaaacactctgtttgtaaagtctgcaagtggatattcaaacttctttgaggccttcgttggaagcgggatatcttcatattctgctagacagaagaattctcagtaacttccttgtgttttgtgtattcaactcacagagttcaacgatcctttacagagagcagacttgaaacactctttttgtggaatttgcaagtggagctttcagccgctttgaggtcaatggtagaaaaggaaacatcttcgtataaaaactagacagaatgattctcagaaactcctttgtgatgtgtgcgtgcaactcacagagtttaacctttcttttcatagagcagttaggaaacactgtgtttgtaaagtctgcaagtggatattcagacctccttgaggccttcgttggaaacgggatttcttcatattatgctagacagaagaattctcagtaacttccttgtgttgtgtgtattcaactgacagagttgaacattcatttagagagagcagatttgaaacactgtttttgtggaatttgcaagttgagatttcaagaggtttggggccaaaggcagaaaaggaaatatcttcgtataaaaactagacagaatcattctcagaaactgctgcgtgatgtgtgcgttcaactctcagagtttaacttttcttttcattcagcggtttggaaacactctgtttgtaaagtctgtaagtggatattttgaccccttagaggccttcgttggaaatgggtttttttcatgtaaggctagacagaagaattcccagtaacttccttgtgttgtgtgcattcaactcacagacttgaacgttcccttagacagagcagatttgaaacactctatttgtgcaatttgcaagtgtagatttcaagcgctttcaggtcaatggcagaaaaggaaatatcttcctttcaaaactagacagaatcattcccacaaactgcgttgtgatgtgttcgttcaactcacagagtttaacctttcttttcatagagcagttaggaaacactctggttgtaaagtctgcaagtggatattcagacctctttgaggccttcgttggaaacgggatttcttcatattctgctagacagaataattctcagtaacttcccttgtgttgtgtgtattcaactcacagagttcaacgatcctttacagagagcagacttgaaacactctttttgtggaattcgcaagtggagatttcagccgctttgaggtcaatggtagaaaaggatatatcttcgtataaagactagacagaatgattctcagaaactcctttgtgatgtgtgcgttcaactcacagagtttaacctttcttttcatagagcagttaggaaacactctgtttgtaaagtctgcaagtggatattcagagctccttgaggccttctttggaaacgggatttcttcatattatgctagacagaagaattctcagtaacttccttgtgttttgtgtattcaactcacagagttcaacgatcctttacacagagcagacttgaaacactctttttgtggaatttgcaagtggagatttcagccgctttgaggtcaatggtagaaaaggaaatatcttcgtataaaaactagacagacaatgattctcagaaactcctttgtgatgtgtgtgttcaactcacagagtttaacctttcttttcatagagcagttaggaaacactctgtttgtaaagtctgcaagaggatattcagacctctttgaggccttcgttggaaacgggtttttttcatataaggctagacagaagaattcccagtaacttccttgtgttgtgtgtgttcaactcagagagttgaactctcatttacacagagcagatttgaaacactctttttgtggaatttgcaagtggagatttcaagcgctttgaggcgaaaggcagaaaaggaaatatcttcgtataaaaactagacagaattattctcagaaactgctctgcgatgtgtgcgttcaactctcagagtttaacttttcttttcattcagcagtttggaaacactctgtttgtaaagtctgcacgtggataacttgaccacttagaggccttcgttggaaacgggtttttttcatgtaaggctagacagaagaattctaagtaacttcctcgtgttgtgtgtattcaactcacagagttgagcgacgctttacacagagcagacttgaaacactctttttgtggaatttgcaattggagatttcagccgctttgaggtcaatggttgaaaaggaaatatcttcgtttcaaaactagacagaatgattctcagaaactcctttgtgatgtgtgcgttcaactcacagaggttaacctttcttttcatagagcagttaggaaacactctgtttgtaatgtctgcaagtggagattcagacctgcttgaggccttcgttggaaacgggatttcttcatattatgctagacagaagaattctcagtaagttccttgtagtgtgtgtattcaactcacagagttaaacgatcctttacacagagcatacttgaaacactctttttgtggaatttgcaagtggagatttcagccgctttgaggtcaatggtagaataggaagtatctccctatagaaattagacagaatgattctcagaaactcctttgtgatgtgtgcgttcaactcacacagtttaacctttcttttcatagagcagttaggaaacactctgtaaagtctgcaagtggatattcagacctccttgaggccttcgttggaaacgggatttcttcatattatgctagacagaagagttctcagtaacttccttgtgttgtgtgtattcaactcacagagttgaacgatcctttacacagagcagacttgaaacactctttttgtggaatttgcaagtggagatttcagccgcgttgaggtcaatggtagaaaaggaaatatcttcgtataaaaactagacagaatgattctcagaaactcctttgtgatgtgtgtgttcaactcacagagtttaacctttcttttcatagagcagttaggaaacactctgcttgtaaagtctccaagtggatattcagccctctttgaggccatcgttggaaacgggtttttttcatataaggctagacagaagaattcccagtaacttccttgtgttgtgtgtgttcaactcacagagttgaactttcatttacacagagcaggtttgaaacactctttttgtggaatttgcaaatggagatttcaagcgctttgaggccaaaggcagaaaaggaaatatcttcgtataaaaactagacagaatcattctcagaaactgctgcgtgatgtgtgcgttcaactctcagagtttaacttttcttttcattcagcggtttggaaacactctgtttgtaaagtctgcacgaggatattttgaccccttagaggccttcgttggaaacgggtttttttcatgtaaggctagacagaagaattctcagtaacttccttgtgttgtgtgtattcaactcacagagttgaaggatcctttacagagagcaggattgaaaaactctttttgtcgaatttgcaagtggagatttcagccgctttgaagccaatggtagaataggaaatatcttcttatagaaactagacagaatgattctcagaaactcctttgtgatgtgtgcgttcaactcacagaggttaacctttcttttcatagagcagttaggaaacactctgtttgtaaagtctgcaagtggagattcagacctgcttgaggccttcgttggatacgggatttcttcatattatgctagacagaagaattcccagtaactcccttgtgttgtgtgtgttcaactcacagagttgaactttcatttacacagagcagatttgaaacactctttttgtggaatttgcaaatggagatttcaagcgctttgaggccaaaggcagaaaaggaaataacttcgtttcaaaactagagagaaatcattctcagaaactgctctgcgatgtgtgcgttcaactctcagcagtttaacttttcttttcattcagcagtttggaaacactctgtttgtaaagtctgcacgtggataatttgaccacttagaggccttcgttggaaacgggtttttttcatgtaaggctagacagaagaattcccagtaacttccttgtgttgtgtacattcaactcacagagttgaacgttcccttagacagagcagatttgaaacactctttttgtgcaattggcaagtggagatttcaagcgctttaaggtcaatggcagaaaaggaaatatcttcgtttcaaaactagagagaatcattcccacaaactgcgttgtgatgtgttcattcaactcacagagtttaacctttcttttcatagagcagttaggaaacagtctgtttgtaaattctgtaagtggatattctgacatcttgtggccttcgttggaaacgggatttcttcatattctgctagacagaagaattctcagaaacttccttgtgttgtgtgtattcaactcacagagttgaacgatcctttactcagagcagacttgaaacactccttttgtggaatttgcaagagaagatttcagccgcttttaggtcaatggtagaataggaaatatcttcctatagaaactagacagaatgattctcaaaaacttctttgtgatgtgtgcgttcaactcacagagtttaacctttcttttcttagagcagttaggaaacactctgtttgtaaactctgcaagtggatattcagacctctttgaggccttcgttggaaacgggatttcttcatactatgctagacagaagaattctcagaaagttcgttgtgttgtgtgttttcaactcacagagttcaacgatcctttacacagagtagacttgaaacaccctttttgtggaattggcagggtggagatttcagccgctttgaggtcaatggaagaaaaggaaatatcttcgtataaaaactagacagaatgattctcagaaaatcttttgtgatgtgtgtgttcaactcacagagtttaacttttcttctcatagagcagttaggaaacactctgtttgtaaagtctgcaagtggatattcagacctctttgaggccttcgttggaaacgggatttcttcatattatgctagacagaagaattctcagtaacttccttgtgttgtgtgtattcaactcacagagttcaacgatcctttacacagagcagacttgaaacactctttttgtggaatttgcaagtggagatttcagccgctttgaggtcaatggcagaaaaggaaatatcttcgtataaaaactagacagaatgattctcagaaactcctttgtgatgtgtgcgttcaactcacagagtttaacctttcttttcatagagcagttaggaaacactctatttgtacagtctgcaagtggatattcagacctccttgaggccttcgttggaaacgggatttcttcatattctgctagacagaagaattctcagtaacttccttgtgttgtgtgtattcaactcacagagttgaacgatcgtttacacagagcagacttgaaacattctttttgtggaatttgcaagtggagatttcagccgctttgtggtcaatggtagaataggaaatatcttcctatagaaactagacagaatcattctcagaaactgctctgcgatgtgtgcgttcaactctcagagtttaacttttcttttcattcagcagtttggaaacactctgtttgtaaagtctgcacgtggataacttgaccacttagaggccttcgttggaaaagggtttttttcatgtaaggctagacagaagaattctcagtaacttccttgtgttgtgtttattcaacacacagagttgaatgatcctttacccagagcagacttgaaacactctttttgtggaatttgcaagtggagatttcagccgctttgaggtcaatggtagaataggaaatatcttcttatagaaactagacaaaatgattctcagaaactcctttgtgatgtgtgcgttcaactcacagagtttaacctttctgttcatagagctgttaggaaacactctgtttgtaaagtctgcaagtggatattcagacctccttgaggccttcgttggaaacgggatttcttcatattctgctagacaggagtaattcccagtaacttccttgtgttgtgtgtgttcaactcatagagttgaactttgatttacacagagcagatttgaaacactctttttgtggaatttgcaagtggagatttcaagcgctttgaggccaaaggcagaaaaggaaatatcttcgtataaaaactagacagaatcattctcagaaactgctctgcgatgtgtgcgttcaactctcagagtttaacttttcttttcattcagaagtttggaaacactctgtttgtaaagtctgcacgtggataacttgaccacttagaggccttcgttggaaacgggtttttttcacgtaaggctagacagaagaattccgagtaacttccttgtgttgtgtgcattcaaatcacagagttgaacgttcccttagacagagcagatttgaaacactctatttgtgcaatttgcaagtgtagatttcaagcgctttaaggtcaatggcagaaaaggaaatatcttcgtttcaaaactagacagaaatcattcccacaaactgcgttgtgatgtgttcattcaactcacagagcttaacctttctgttcatagagcagttaggaaacactctgtttgtaaagtctgtaagtggatattctgacatcttgtggccttcgttggaaacgggatttcttcatattctgctagacagaagaattctcagtaacttccttgtgttgtgtgtattcacctcacagagttgaacgatcctttacacagagcagacgtgtaacactctttttgtgtaatttgcaagtggagatttcagccgctttgaagtcaaaggtagaaaaggaaatatcttcctataaaaactagacagaatgattctcagaaactcctttgtgatgtgtgcgttcaactcacagagtttaaccattcttttcatagagcagttaggaaaaactctgtttgtaaagtctgcaagtcgatattcagacctccttgaggccttcgttggaaacgcgatttcttcatattctgctagacagaagaattctcagtaacttccttgtgttgtgtgtattcaactcacagagttgaactatcctttacagagagcagacttaaaacactctttttgtggaatttgcaagtggagatttcagccgctttgaggtcaatagtagaaaagcaaatatcttcgtagaaaaactagacagaatgattctcagaaactcctttgtgatgtgtgcgttcaactcacagagtttaacctttcttttcttagagcagttaggaaacactctgtttataaagtctgcaagtggatattcagacctctttgaggccttcgttggaaacgggatttcttcatattctggtagacagaagaattcccagtaacttccttgtgttgtgtgtgttcaactcacagagttgaactttcatttacacagagcagatttgaaacactctttttgtggaatttgcaagtggagatttcaagcgctttgaggccaaaggcagacaaggaaatatcttcgtataaaaactagacagaatcattctcagaaactgctctgtgatgtgtgcgttcaactctcagagtttaacttttcttttcattctacagtttggaaacactctgtttgtaaagtctgcacgtggatattttgaccacttagaggccttcgttggaaacgggtttttttcatgtaaggctagacagaagaattcccagtaacttccttgtgttgtgtgcattcaactcacagagttgaacgttcccttagacagagcagatttgaaacactctatttgtgcaatttgcaagtgtagatttcaagcgttttaaggtcaatggcagaaaaggaaatatcttcgtttcaaaactagacagaatcattcccacaaactgcgttgtgatgtgttcgttcaactcacagagtttaacctttctgttcatagagcagttaggaaacactctgtttgtaaagtctgcaagtggacattcagacctccttgaggccttcgttggaaacgggatttcttcatattctgctagacagaagaattctcagaatcttccttgtgttgtgtgtattcaactcacagagttgaacgatcctttacacagagcagacttgaaacactctttttgtggaatttgcaagtggagatttcagccgctttgaggtccatggtagaaaaggaaatatctttgtataaaaactagtcagaatgattctcagaaacttctttgtgatgtgtgcgttcaactcacagagtttaacctttcttttcatagagcagttaggaaacactctgtttgtaaactctgcaagtggatattcagacctctttgaggccttcgttggaaactggatttcttcatactatgctagacagaagaattctcagtaacttccttgtgttgtgtgtattcaactcacagagttgaacgatcctttacacagagcagacttgaaacactctttttgtggaatttgcaagtggagatttcagccgctttgaggtcaatggtagaataggaaatatcttcctatacaaactagacagaatgattctcagaaactcctttgtgatgtgtgccttcaactcacagagtttaacctttcttttcatagagcagttaggaaacactctgtttgtaaagtctgcaagtggatattccgacatccttgaggctttcgttggaaacgggatttcttcatattctgcaagaaagaagaattctcagtaacttccttgtgttgtgtgtattcaactgacagagttgaactttcatttagagagagcagatttgaaacactgtttttgtggaatttgcaaatggagatttcaagcgctttggggccaaaggcagaaaacgaaatatcttcgtataaaaactagacagaatcattctcagaaactgctctgcgatgtgtgcgttcaactctcagagtttaacttttcttttcattcagcggtttggaaacactctgtttgtaaagtctgcacgtggataatttggccacttagaggccttcgttggaaacgtgtttttttcatgtaaggctagacagaagaattctcagtaacttccttgtgttgtgtggattcaactcacagagttgaacgatcctttacacagagcggacttgaaacactcgttttgtggaatttgcaagtggagatttcagccgctttgaggtcaatggtagaaaaggaaatatcttcgtacaaaaactagacagaacgattctcagaaactcctttgtgatgtgtgcgttcaactcacagagtttaacctttcttttcatagagcagttaggaaacactctgtttgtaacgtctgcaagtggatattcagacctccttgaggccttcgttggaaacgggatttcttcctattctgctagacagaagaattcccagtaacttccttgtgttgtgtgtgttcaactcacagagttgaactttcctttacacagagcagatttgaaacactctttttgtggaatttgcaggtggagatttcaagcgctttgaggccaaaggcagaaaaggaaatatcttcgtataaaaactagacagaatcattctcagaaactgctctgcgatgtgtgcattcaactctcagagtttaatttttcttttcattcagcagtttggaaacattctctttgtaaagtctgcacgtggatattttgaccacttagaggccttcgttggaaacgggttttattcctgtaaggctagacagaagaattcccagtaacttccttgtgttgtgtacattcaacacacagatttgaacgttcccttagacagagctgatttgaaacactctttttgtgcaattggcaagtggagatttcaagcgctttaaggtcaatggcagaaaaggaaatatcttcgtttcaaaactagacagaatcattcccacaaactgcgttgtgatgtgttcgttcaactcacagagtttaacctttctgttcatagagcagttaggaaacactctgtttgtaaagtctgaaagtggatattctgacatcttgtggccttcgttggaaacaggatttcttcatattctgctagacagaagaattctcagaatcttcccttgtgttgtgtgtattccactcacagagttgaacgatggtttacacagagcagatttgaaacactctttgtgtggaatttgcaagtggagatttcagccgctttgaggtcaatggtagaaaaggaaatatcttcgtataaaaactagacagaatgattctcagaaactcctatgtgatgtgtgcgttcaactcacagagtttaacttttcttttcagagagcagttaggaaacactctgtttgtaaagtctgcaagtggatattcagacctctttgaggccttcgttggaaacgggatttcttcatattatgctagacagaagaattctcagtaacttcctcgtgttgtgtgtattcaactcacagagttgaacgatcctttacacagagcagattagaaacactctttttgtggaatttgcaagtggagatttcagccgctttgaggtcaatggtagaaaaggaaatatcttcatagaaaaactagacagaatgattctcagaaacttcattgtgatgtgtgcgttcaactcacagagtttaacctttcttttcatagagcagttaggaaacactctgtttgtaaactctgcaagtgtatattcagacctctttgaggacttcgttggaaacgggatttcttcatactgtgctagacagaagaattctcagtaacttccttctgttgtgtgtattcaactgacagagttgaactttcatttagagagggcagatttgaaacactgtttttgtggaatttgcaagtggagatttcaagcgctttggggccaaaggcagaaaaggaaatatcttcgtataaaaactagacagaatcattctcagaatctgctctgtgatgtgtgcgttcaactctcagagtttaacttttcttttcattctacagtttggaaacactctgtttgtaaagtctgcacgtggatattttgaccacttagaggccttcgttggaaacgggtttttttcatgtaaggctagacagaagaattcccagtaacttccttgtgttgtgtgcattcaactcacagagttgaacgttcccttagacagagcagatttgaaacactctatttgtgcaatttgcaagtgtagttttcaagctctttaaggtcaacggcagaaaaggaaatatctgcgtttcaaaactagacagaatcattcccacaaactgcgttgtgatgtgttcgttcatctcacagagtttaacctttcttttcatagagcagttaggaaacagtctgtttgtaaattctgtaagtggataatttgacatcttgtggccttcgttggaaacgggatttcttcatattctgctagacagaagaattctcagtaacttccttgtgttgtgtgtattcaactcacagagttgaacgatcctttacacagagcagacttgaaacactgttttagtggaatttgcaagtggagatttcagccgctttgaggtcaatggtagaataggaaatatcttcctatagaaactagaccgaatgattctcagaaactgctttgtgatttgtgcgttcaactcacagagtttaacctttcttttcatagagaagttaggaaacactctgtttgtaaagtctgcatgtggatattcagacctccttgaggccttcgttggaaacgtgatttcttcatattatgctagacagaagaattctcagtaacttccttgtgttgtgtgtattcacctcaccgatttgaacgatcctttacacagagcagacttgaaacactctttttgtggaatttgcaagtggagatttcagccgctttgaggtcaatggtagaataggaaatatcttcctatagaaattagacagaatgtttctcagaaactcctttctgatgtgtgtgttcaactcacagagtttaacctttcttttcatagagcagttaggaaacactctgtttgtaaagtctgcaagtggatattcagacctctttgaggccttcgttggaaacgggtttttttcatgtaaggctagacagaagaattcccagtaacttccttgtgttgtgtgtgttcaactcacggagttgagctttcatttacacagagcagatttgaaacactctttttgtggaatttgcaagtggagatttcaagcgctttgaggccaaaggcagaaaaggaaatatcttcgtataaaaactagacagaatcattctcagaaactgctgcgtgatgtgtgcgttcaactctcagagtttaacttttcttttcattcagcggtttggaaacactctgtttgtaaagtctgcacctggatattttgaccacttagaggccttcgttggaaacgggtttttttcatgtaaggctagacagaagaattcccagtaacttccttgtgttgtgtacattcaactcacagagttgaacagttcccttagacagagcagatttgaaacactctttttgtgcaattggcaagtggagatttcaagcgctttaaggtcaatggcagaaaaggaaatatcttcgtttcaaaactagagagaatcattcccacaaactgcgttgtgatgtgttcgttcaactcacagagtttaacttttctgttcatagagcagttaggatacactctgtttgtaaagtctgtaagtggatattctgacatcttgtggccttcgttttaaacgggatttcttcatattctgctagacagaagaattctcagaatcttccttgtgttgtgtgtattcaactcacagagttgaacgatggtttacacagagcagatttgaaacactctttttgtggaatttgcaagtggagatttcagccgcttagaggtcaatggtagaaaaggaaatatcttcgtataaaaactagacagaatgattctcagaaactcctttgtgatgtgtgcgttcaattcacagagtttaacctttctattcatagagcagttaggaaacactgtgtttgtaaagtctgcaagtggatattcagacctctttgaggctttcgttggaaacgggatttcttcatattctgctagacagaagaattctcagtaacttccttgtgctgtgtgtattcaactcacagagttgaacgatccttttcagagagcagactttaaacactctttttgtggaatttgcaagtggagatttcagccgctttgaggtcaatggtagaaaaggaaatatcttcgtataaagactagacagaatgattctcagaaactcctttgtgatgtgtgcgttcaactcacagagtttaacctttctgttcatagagcatttaggaaacactctgtttgtaaagtctgcaagtggatattcagacctccttgaggccttcgttggaaacgggatttcttcatattctgctagacagaagaattctcagtaacttccttgtgttgtgtgtattcaactgacagagttgaactttcatttagagagagcagatttataacactgtttttgtggaatttgcaagtggagatttcagccgctttggggccaaaggccgaaaaggaaatatcttcgtataaaaactagacagaaatcattctcagaaactgctctgcgatgtgggtgttcaactctcagagtttaacttttcttttcattcagcagtttggaaacactctgtttgtaaagtctgcacgtggatattttcaccacttagaggccttcgttggaaacgggtttttttcctgtaaggctagacagaagaattcccagtaacttccttgtgttgtgtacattcaactcacagagttgaacgttcccttagacagagcagatttgaaacactctttttgtgcaattggcaaatggagatttcaagcgctttaagttcaatggcagaaaaggaaatatcttcgtttcaaaactagacagaatcattcccacaaactgcgttgtgatgtgttcgttcaactcacagggtttaacctttcttttcatagagcagttaggaaacagtctgtttgtcatttctgtaagtggatattctgacatcttgtggccttcgttggaaacgggatttcttcatattctgctagacagaagaattctcagcaacttccttgtgttgtgtgtattcaactcacagagttgaacgatcctttgagcagacttgaaacactctttttgtggaatttgcaagtggagatttaagccgctttgaggtcaattgtagaaaaggaagtatcttcgtataaaaactagacagaatgattctgagaaactcctttgtgatgtgtgcgttcaactcacagagtttaacctttcttttcatagagcagttaggaaacactctgtttgtgaagtctgcaagtggatattcagacatctttgaggctttcgttggaaactggatttcttcatattctgctatacagaagaattctcagaaacttccttgtgttgtgtgtattcaactcacagagttgaacgatcatttacacagagcagacttgagacactctttttgtggaatttgtaagtggacatttcagccgctttgaggtcaatggtagaaaaggaaatatcttcatataaaaactagacagaatgattctcagaaactcctttgtgatgtgtgcgttcaactcacagagtttaatctttcttttcatagagcagttaggaaacactctgtttgtaaagactgcaagtggatattcagacctctttgaggccttcgttggaaacgggtttttttcatataaggctagacagagaagattctcagtaacttccttgtgttgtgtgtattcaactcacagagttgaactttcatttacacagagcagatttgaaacactctttttgtggaatttgcaaatggagatttcaagcgctttgaggccaaaggcagaaaaggaaatatcttcgtataaaaactagacagatcattgctcagaaactgctctgggatgtgtgcgttcaactctcagagtttaacttttcttttcattcagcagtgtggaaacactctgtttgtaaagtctgcacgtggatattttgaccacttagaggccttcgttggaaacgggtttttttcctgtaaggctagacagaagaattcccagtaacttccttgtgttgtgtacattcaactcacagagttgaacgttcccttagacagagcagatttgaaatactctttttgtgcaattggcaagtggagatttcaagcgctttaaggtcaatggcagaaaaggaaatatcttggtttcaaaactagacagaatgaatcccacaaactgcgttgtgatgtgttcgttcaactcacagagtttaacctttctgttcatagagcagttaggaaacactctgtttgtaaagtctgtaagtggatattctgacattttgtggccttggttggaaatgggatttcttcatatactccaagacagaagaattctcagtaacttccttgtgttgtgtgtattcaactcacagagttgaacgatcctttacacagagcggacttgaaacacactttttgtggaatttgcaagtggagatttcagccgcattgaggtcaatggtagaaaaggaaatatcttcgtataaaagttagacagaatgattctcagaaactcctttgtgatgtgtgcgttcaactcatagagtttaacttttcttttcatagagcagttaggaaacactctgtttgtaaagacttcaagtggatattcagacctctttgaggccttcgttggaaacgggatttcttcatattctgctagacagaagaattcccagtaacttccttgtgttgtgtgtgttcaactcacagagttgaacttccgtttacacagagcagatttgaaacactctttttgtggaatttgcaaatggagatttcaagcgctttgaggccaaaggcagaaaaggaaatatcttcgtataaaaattcgacagaatcattctcagaaactgctctgcgatgtgtgcgttcaactctcagagtttaacttttcttttcattcagcagtttggaaacactctgtttgtaaagtctgcacgtggatattttgaccacttagaggccttcattggaaacgggtttctttcctgtaaggctagacagaagaattcccagtaacttccttgtgttgggtgcattaaactcacagagttgaacgttcccttagacagagcagatttgaaacactctatttgtgcaatttgcaagtgtagatttcaagcgctttaaggtcaatggcagaaaaggaaatatcttcgtttcaaaactagacagaatcattcccacaaactgcgttgtgatgtgttcgttcaactcacagagtttaacctttgttttcatagagcagttaggaaacagtctgtttgtaaattctgtaagtggatattctgacatcttgtggccttcgttggaaacgggatttcttcatattctgctagacagaagaattctcagtaacttccttgtgttgtgtgtattcaagtcacagagttgaacgatcctttacacagagcagacttgtaacactctttttgtggaatttgcaagtggagatttcagccgctttgaagtcaaaggtagaaaaggaaatatcttcctataaaaactagacagaatgattctcagaaactcctttgtgatgtgtgtgttcaactcacagagtttaacctttcttttcatagaacagttaggaatcactctgtttgtaaagtctgcaagtggatattcagacctctttgaggccttcgttggaaacgggtttttttcatataaggctagacagaagaattcccagtaacttccttgtgttgtgtgtgttcaactcacagagctgaactttcatttacacagagcagatttgaaacactctttttgtggaatttgcaagtggagatttcaagcgctttgaggccaaaggcagaaaaggaaatatcttcgtttcaaaactagacagaatgattctcagaaactcctttgtgatgtgtgcgttcaactcacagagttcaacctttcttttcatagagcagttgggaaacactctgtttgtaaagtctgcaagtgcttattcagacttctttgaggccttcgttggaagcgggatttcttcatattctgctagacagaagaattctcagtaactgccttgtgttgtgtgtattcaactcacagagttgaaggatcctttacacagagcagacttgaaacactctttttgtggaatttgcaagtggagatttcagccgctttgaggtcaatggtagaataggaaatatcttcctatagaaactagacagaatgattctcagtaaactcctttgtgatgtgtgcgttcaactcacagagtttaacctttcttttcatagagcagttaggaaacactctgcttgtaaagtctgcaagtggatattcagccctctttgaggccttcgttggaaacgggtttttttcatataaggctagacagaagaattcccagtaacttccttgtgttgtgtgtgttcaactcacagagttgaactttcatttacacagagcagatttgaaacactctttttgtggaatttgcaaatggagatttcaagcgctttgaggccaaaggcagaaaaggaaatatcttcgtacaaaaactagacagaatcattctcagaaactgctctgcgatgtgtgcgttcaactctcagagtttaacttttcttttcattcagcagtttggaaacactctgtttgtaaagtctgcacgtggataatttgaccacttagaggccttcgttggaaacgggtttttttcatgtaaggctacacagaagaattcccagtaacttccttgtgttgtgtacattcaactcacagagttgaacgtttccttagacagagcagatttgaaacactctttttgtgcaattggcaagtggagatttcaagcgctttgaggtcaatggcagaaaaggaaatatcttcgtttcaaaactagacagaatcattcccacaaactgcgttgtgatgtgttcgttcatctcacagagtttaacctttcttttcgtagagcagttaggaaacagtctgtttctaaattctgtaagtggatattctgacatcttgtggccttcgttggaaacgggatttcttcatattctgctagacagaagaattctcagaatctttccttgtgttgtgtgtattcaactcacagagttgaacgatcctttacacagagcagacttgaaacactctttttgtggaatttgcaagtggagatttcagccgctttgaggtccatggtagaaaaggaaatatcttcgtataaaaactagacagatgattctcagaaactcttttgtgatgtgtgcgttcaactcacagagtttaacctttctgttcatagagccgttaggaaacactctgtttgtaaagtctgcaagtggatattcacacctccttgtgaccttcgtttgaaacgggatttcttcatattctgctagacagaggaattctcagtaacttccttgtgttctgtgtattcaactgacagagttgaacgatcctttacacagagcagacttgaaacactctttttgtggaatttgcaagtggagatttcagcctctttgaggtcaatggtagaaaaggaaactatcttcgtatacagactagacagaatgattctcagaaactcctttgtgatgtgtgttttcaactcacagagtttaacctttcttttcatagagcagttaggaaacactctgtttataaagtctgcaagtggatattcagacccctttgaggccttcgttggaaacgggatttcttcatattatgctagacagaagaattcccagtaacttccttgtgttgtgtgtgttcaactcacagagttgaactctcatttacacagagcagatttgaaacactctttttgtggaatttgcaaatggagatttcaagcgctttgaggccaaaggcagaaaaggaaatatcttcgtttcaaaactagacagaatcattctcagaaactgctgcgtgatgtgtgcgttcaactctcagagtttaacttttcttttcattcagcggtttggaaacactctgtttgtaaagtctgcacgtggaaattttgaccacttagaggccttcgttggaaatgggtttttttcatgtaaggctagacagaagaattcccagtaacttccttgtgttgtgtgcattcaactcacagagttgaacgttcccttagacagagcagatttgaaacactctatttgtgcaatttgcaagtgtagttttcaagctctttaaggtcaacggcagaaaaggaaatatcttggtttcaaaactagacagaatcattcccacaaactgcgttgtgatgtgttcgttcaactcacagagtttaacctttctgttcatagagcagttaggaaacactctgttaagtctgtaagtggatattctgacatcttgtggccttcgttggaaacgggatttcttcatattctgctagacagaagaattctcagtaacttccttgtgttgtgtgtattcaactcacagagctgaacgatcctttacacagagcagacttgaaacattctttttgtcgaatttgcaagtggagatttcagccgctttgaggtcaatggtagaataggaaatatcttcctatagaaactagacagaatgattctcagaaaatcctttgtgacgtgtgcgttcaactcacagagtttaacttttcttttcatagagcagttaggaaacactctgtttgtaaagtctgcaagtggatattcagacctctttgaggccttcgttggaaacgggatttcttcatattctgctagacagaagaattctcagtaacttccttgtgttgtgtgtattcaactcacagagttgaacgatcctttacacagagcagacttgaaacactctttttgtggaatttgcaagtggagatttctgcctctttgaggtcaatggtagaataggagatatcttcctatagaaactagacagaatgattctcagaaactcctttttgatgtgtgcgttcaactcacagagtttaacttttcttttcatagagcagttagtaaacactctgtttataaagtctgcaagtggatattcagacccctttgaggccttcgttggaaacgggatttcttcatattgtgctagacagaagaattcccagtaacttgcttgtgttgtgtgtgttcaactcacagagttgaactttgatttacacagagcagatttgaaacactctttttgtggaatttgcaagtggagatttcaagcgctttgaggccaaaggcagaaaaggaaatatcttcgtataaaaactagacagaatcattctcagaaactgctctgcgatgtgtgcgttcaactctcagagtttaaattttcttttcattcagcagtttggaaacactctgtttgtaaagtctgcacgtggataatttgaccacttagaggccttcgttggaaacgggttttttcctgtaaggctagacagaagaattcccagtaacttccttgtgttgtgtacattcaactcacagagttgaacgttcccttagacagagcagatttgaaaaactctttttgtgcaattggcaagtggtgatttcagccgctttgaggtcaatggtagaaaaggaaatattttcgtataaaaactagacagaatcattcccacaaactgcgttgtgatgtgttcgttcaacccacagagtttaacctttctgttcatagagcagttaggaaacactctgtttgtaaagtatgaaagtggatattctgacatcttgtagccttcgttggaaacgggatttcttcgtattctgctagacagaagaattctcagtaacttccttgtgttgtgtgtattcaactcatagagttgaacgatcctttacacagagcagacttgaaacactctttttgtggaatttgcaagtggagatttcagccgctttgaggtcaatggtagaaaaggaaatatcttcgtataaagactagacagaatgattctcagaaaatcttttgtgatgtgtgcgttcaactcacagagtttaacttttcttctcatagagcagttaagaaacactctgtttgtaaagtctgcaagtggatattcagacctctttgaggccttcgttggaaacgggatttcttcaaattatgctagacagaagaattctcagtaacttccttgtgttgtgtgtattcaactcacagaattgaacgatcctttacacagagcagacttgaaacactctttttgtggaatttgcaagtggagatttcagctgctttgaggtcaatggtagaaaaggaaatatcttcgtatagaaacaagacagaatgattctcagaaactcctttgtgatgtgtgcgttcaactcacagagtttaacctttcttttcatagagcagttaggaaacactctgtttgtaaagtctgcaattggatattcagacctctttgaggccttcgttggaaacgggtttttttcatataaggctagacagaagaattctctgtaacttccttgtgttgtgtgtattcaactcacagagttgaacgatcctttacacagagcagacttgaaacactctttttgtggaatttgcaagtggagatttcagccgctttgaggtcaatggtagaataggaaatatcttcctatagaaactagacagaatgattctcagaaactcctttgtgatgtgtgcgttcaactcacagagtttaacctttcttttcatagagcagttaggaaacactctgtttgtaaattctgcaagtggatattcagacctctttgaggccttcgttggaaacgggtttttttcatataaggctagacagaagaattctcagaatcttcccttgtgttgtgtgtattcaactcaccgagttgaacgatcctttacacagagcagacttgaaacactctttttgtggaatttgcaagtggacatttcagccactttgaggtccgtggtagaaaaggaaataccttcgtataaaaactagacagaatgattctcagaaaatcttttgtgatgtgtgcgttcaactcaccgagtttaacttttcttctcatagagcagttaggaaacactctgtttgtaaagtctgcaagtggatattccgacctctttgaggccttcgttggaaacgggatttcttcatattatgctagacagaagaattcccagtaacttccttgggttgtgtgtattcaactcacagagttgaacgatcctttacacagagcagacttgtaacactctttttgtggaatttgcaagtggagatttcagccgctttgaagtcaaaggtagaaaaggaaatatcttcctataaaaactagacagaatgattctcagaaactccattgtgatgtgtgtgtccaactcacagagtttaacctttcttttcatagagcagttaggaaacactcagtttgtaaagtctgcaagaggatattcagacctctttgaggccttcgttggaaacgggtttttttcatataaggctagacagaataattctcagtaacttccttgtgttgtgtgtattcaactctcagagttgaacgatcctttacagagagcagacttgaaacactctttttgtggaatttgcaagtggagatttcagccgctttgaggtcaatggtagaataggaaatatcttcctatcgaaactagacagaatgattctcagaaactcctttgtgatgtgtgcgttcaactcacagagttcaacttttctttccatagagcagttaggaaacactctgtttgtaaagtctgcaagtggatattcagacctctttgaggccttcgttggaaacgggatttcttcatattctgcaagacagaagaattctcagtaacttccttgtgttgtgtgtattcaactcacagagttgaatgatcctttacagagagcagactttaaacacactttttgtggaatttgcaagtggagacttcagccgctttgaggtcaatggtagaaaaggaaatatcttcgtataaagactagacagaatgattctcagaaacttctttgtgatgtgtgcgttcaactcacagagtttaacctttcttttcatagagcagttaggaaagactctgtttgtaaagtctgcaagtggatattcagacctctttgaggccttctttggaaacgggtttttttcatataaggctagacataagaattctcagtaacttccttgtgttgtgtgtattcagctgacagagttgaactttcatttagagagagcagatttgaaacactgtttttgtggaatttgcaagtggagatttcaagcgctttgtggccaaaggcagaaaacgatatatcttcgtataaaaactagacagaatcattctcagaaactgctctgcgatgtgtgcgttcaactctcagagtttaacttttcttttcattcagcagtttggaaacactctgtttgtaaagtctgcacgtggataacttgaccacttagaggccttcgttggaaacgggtttttttctgtaaggctagacagaagaattcccagtaacttccttgtgttgtgtgcattcaactcacagagttgaacgttcccttagacagagcagatttgaaaaactctatttgtgcaatttgcaagtgtagatttcaagcgatttaaggtcaacggcagaaaaggaaatatcttcgtttcaaaactagacagaatcattcccacaaactgcgttgtgatgtgttcgttcaactcacagagtttaacccttctgttcatagagcagttaggaaacactctgtttgtaaagtatgcaagtggatattcagacctccttgaggccttcgttggaaacgggatttcttcatattctgctagaccgaagaattctcagtaacttccttgtgttgtgtgtattcaactcacagagttgaacgatcctttacacagagcagacttgaaacactctttttgtggaatttgccagtggagatttcagccgctttgagttcaatggtagaataggaaatatcttcctatagaaactagagagaatgattctcagaaaatcttttgtgatgtgtgcgttcaactcacagagtttaacttttcttctcatagagcagttaggaaacactctgtttgtaaagtctgcaagtggatattcagacctgtttgaggccttcgttggaaacgggatttcttcatattatgctagacagaagaattctcagtaacttccttgtgttgtgtgtattcaactgacagagttgaactttcatttagagagagcagatttgaaacactgtttttgtggaatttgcaagtggagatttcaagcgctttggggccaaaggcagaaaaggaaatatcttcgtataaaaacaagacagaatcattctcagaaactgctctgcgatgtgtgcgttcaactctcagtagtttaacttttcttttcattcagcagtttggaaacactctgtttgtaaagtctgcacgtggatattttgaccacttagaggccttctttggaaacgggtttttttcctgtaaggctagacagaagaattcccagtaacttccttgtgttgtgtgcattcaactcacagagttgaacgttcccttagacagagcagatttgaaacactctatttgtgcaattggcaagtgtagatttcaagcgctttaaggtcaatggcagaagaggaaatatcttcgtttcaaaactagacagaatcattcccacaaactgcgttgtgatgtgttcgttcaactcacagagtttaacctttctgttcatagagcagttaggaaacactctgtttgtaaagtctgtaagtggatattctgaaatcttgtggtcttcgttggaaacgggatttcttcatattctgctagacagaagaattctcagaaacttccttgtgttgtgtgtattcaactcacagagttgaacgatcgtttacacagagcagacttgagacactctttttgtggaatttgtaagtggagatttcagccgctttgaggtcaatggtagaaaaggaaatatcttcatatataaaccagacagaatgattctcataaactcctttgtgatgtgtgcgttcaactcacagagtttaacttttcatttcatagagccgttaggaaacactctgtttgtaaaatctgcaagtggatattcagacctctttgaggccttcattggaaacgggatttcttcatattatgctagacagaagaattctcagtaacttccttgtgttgtgtgtattcaactcacagagttgaacgatcctttacacagagcagacttgaaacactctttttgtggaatttgcaagtggagatttcagccgctttgaggtcaatggtagaaaaggaaactatcttcgtataaagaccagacagaatgattctcagaaactactttgtgatgtgtgcgttcaactcacagggtttaacctttcttttcatagagcggttaggaaacactctgtttgtaaagtctgcaagtggatattcagacctccttgagggcttcgttggaaacgggatttcttcatattctgctagacagaagaattctcagtaacttccttgtgttgtgtgtattcaacttacagagttgaacgatcctttacacagaacagacttgaaacactgtttttgtggaatttgcaagtggagatttcagccgctttgtggtcaatggtagaataggaaatatgttcctatagaaactagacagaatgattctcagaaactcctttgtgatgtgtgcgttcaactcacagagtttaacctttcttttcatagagcagttaggaaacactctgtatgtaaagtctgcaagtggctattcagacctctttgaggccttctttggaaacgggatttcttcatattatgttagagagaggaattctcaggaacttccttgtgttgtgtgtattcaactcacagagttgaacgatcctttacacagagcagacttgaaacactctttttgtggaatttgcaagtggagatttcagccgctttgaggtcaataggtagaataggaaatatcttcctatagaaactagacagaatgattctcagaaactcctttgtgatgtgtgcgttcaactcgcagagtttaacctttcttttcatagagcagttaggaaacactctgttggtaaagtctgcaagtggatattcagacctcgttgaggccttcgttggaaacgggatttcttcatattatgctagacagaagaattctcagtaacttccttgtgttgtgtgtattcaactcacagagttgaacgatcctttacacagagcagacttgaaacactctttttgtggaacttgcaagtggagatttcagccgctttgaggtcaattgtagaataggaaatatcttcctatagaaactagacagaatgattctcagaaacttctttgtgatgtgtgcgttcaactcacagagtttaacctttcttttcatagagcagttaggaaacactctgtttgtaaactctgcaagtggatattcagacctctttgaggccttcgttgcaaacgggatttcttcatattatgcctgacagaagaattctcagtaacttccttgtgttgtgtgtattcaacgcacagagttgaacgatcctttacacagagcatacttgaaacactcttcttgcggaatttgcaagtggagatttcagccgctttgaggtcaatggtagaataggaaatatcttcctatagaaactagacagaatgattctcagaaactcctttgtgatgtgtgcgttgaactcacagagtttaacctttcttttcatagagcagttaggaaacactctgtttgtaaagtctgcacgtggatatttggacttctttgaggccttcgttggaaacgggtttttttcatgtaaggctaggcagcagaattctcagtaacttccttgtgttgtgtgtattcaactgacagagttgaactttcatttagagagagcagatttgtaacactgtttttgtggaatttgcaagtggagatttcaagcgatttgcggccaaaggcagaaaaggaaatatcttcgtataaaaactagacagaatcattctcagaaactgctctgcgatgtgtgcgttcagctctcagagtttaacttttcttttcattcagcagtttggaaacactctgtttgtaaagtctgcacgtggatattttgaccacttagaggccttcgttggaaacgggtttttgtcatgtaaggctagacagaacaattcccagtaacttccttgtgttgtgtacattcaactcacagagttgaacgttcccttagtcagagcagatttgaaacactctttttgtgcaattggcaagtggagatttcaagcgcttaaggtcaatggcagaaaaggaaatatcttcgtttcaaaactagacagaatcattcccacaaactgcgttgtgatgtgttcgttcaactcacagagtttaacatttctgttcatagagcagttaggaaacactctgtttgtaaagtctgtaagtggatattctgacatcttgtggccttcgttggaaacgggatttcttcctattctgctagacagaagaattctcagcaacttccttgtgttgtgtgtattcaactcacagagttgaactctggtttacacagagcagatttgaaacactctttttgtggaatttgcaagtggagatttcagccgctttgaggtcaatggtagaaaaggaaatatcttcgtataaaaactagacagaatgattctcagaaactcctttgtgatgtgtgcgttcaactcacagagtttaaccattcttttcatagagcagttaggaaacactctgcttgtaaattctgcaagtggatattcagacctccttgaggccttcgttggaaacgggatttcttcatattctgctagacagaagaattctcactaacttccttgtgttgtgtgtattcaactgacagagttgaactttcatttagagagagcagatttgaaacactgtttttgtggaatttgcaagtggagatttcaagcgctttggggccaaaggcagaaaaggaaatatcttcgtataaaaactagacagaatcattctcagaaactgctctgcgatgtgtgcgttcaactctcagagtttaacttttcttttcattcagcagtttggaaacactctgtttgtaaagtctgcaagtggataatttgaccacttagaggccttcgttggaaacgggtttttttcatgtaaggctagacagaagaattctcagtaacttccttgtgttgtgtgtattcaattcacagagttgaacgatcctttacacagagcagacttgtaacactctttttgtggaatttgcaagtggagatttcagccgctttgaagtcaaaggtagaaaaggaaatatcttcctataaaaactagacagaatcattcccacaaactgcgttgtgatgtgttcgttcaactcacagcagtttaacctttctgttcatagagcagttaggaaacactctgtgtgtaaagtctgcaagtggatattcagacctctttgaggccttcgttggaaacgggatttcttcatattctgctagacagaagaattctcagtaacttcctcgtgttgtgtgtactcaactcacagagttgaacgatcctttacacagagcagacttgaaacactctttttgtgaaatttgcaagtggagatttcagccgctttgtggtcaatggtagaataggaaatatcttcctatagaaactagacagaatgattctcagaaacttctttgtgatgtgtgcgttcaactcacagagtttaaccttccttttcatagagcagttgggaaacactctgtttttaaagtctgcaagtggatattcagacctctttgaggccttcgttggaaacgggtttttttcatgtaaggctagacagaagaattctcagaaacgtcctggtgttgtgtgttttaaactcacagagttcaacgatcctttacacagagtagacttgaaacactctttttgttgaattggcaagtggagatttcagccgctttgaggtcagtggtagaaaaggaaatatcttcgtataaaaactagacagagtgattctcagaaactcctttgtgatgtctgcgttcaactcacagggtttaacctttcttttcatagagcagttaggaaacactctgtttgtaaagtctgcaagtggatattcagacctccttgaggccttcgttggaaaccggatttcttcatattttgctatacagaatatttctcagaaacttccttgtgttgtgtgtattcaactcacagagttgaacgatcctttacagagagcagacttgaaacactctttttgtggaatttgcaagtggagatttcagccgctttgaggtcaatggtagaataggaaatatcttcctatagaaactagacagaatgattctcataaactcctttgtgatgtgtgcgttcaactcacagagtttaacctttctgttcatagagcagttaggaaacactctgtttgtaaagtctgcaagtggatattcagacctctttgaggccttcgttggaaacgggatttcttcatattatgctagacagaagaattctcagtaacttccttgtgttgtgtgtattcaactcacagagttgaaggatcctttacagagagcaggcttgaaacactctttttgtcgaatttgcaagtggagatttcagccgctttcaggtcaatggtagaataggaagtatcttcttatagaaactagacagaatgattctcagaatctcctttgaaatgtgtgcgttcaactcacagagtttaacctttcttttcatagagcagttaggaaacactctgtttgtaaagtctgcaagtggatattcagacctctttgaggccttcgttggaaacgggatatcttcatattatgctagacagaagaattcccactaacttccttgtgttgtgtgtgttcaactcacagagttgaactttcatttacccagagcagatttgaaacactctttttgtggaatttgcaagtggagatttcaagcgctttgaggccaaaggcagaaaaggaaatatcttcgtttcaaaactagacagaatcattctctgaaactgctctgcgatgtgtgcgttcaactctcagagtttaacttttcttttcattcagcagtttggaaacactctgtttgtaaagtctgcacgtggatattttgaccacttagaggccttcgttggaaacgggtttttttcctgtaaggctagacagaagaattcccaggaacttccttgtgttgtgtacattcaactcacagagttgaacgttcccttagatagagcagatttgaaacactctttttgtgcaattggcaagtggtgatttcagccgctttgaggtcaatggtagaaaaggaaatatcttcgtataaaaactagacagaacgattctcagaaactcctttgtgatgtgtgcgttcaactcacagagtttaacctttcttttcatagagcagttaggaaacactctgtttgtaaagtctgcaagtggatattcagacccctttgaggccttcgttggaaacgggatttcttcatattatgctagacagaagaattctcagtaacttccttgtgttgtgtgtattcaactcacagagttgaaggatcctttacacagagcagacttgtaacactctttttgtgtaatttgcaagtggagatttcagccgctttgaggtcaatggtagaaaaggaaatctcttcgtataaaaactagacagaatgattctcagaaactcctttgtgatgtgtgccttcaactcacagagtttaacctttcttttcatagagcagttaggaaacactctgtttgtaaagtctgcaagtggatattcagacctctttgaggccttcgttggaaacgggatttcttcatactgtgctagacagaagaattcccagtaacttccttgtgttgtgtgtgttcaactcacagagttgaactttcatttacacagagcagattggaaacactctttttgtggaatttgcaagtggagatttcaagcgctttgaggccaaaggcagaaatggaaatatcttcgtataaaaactagacagaatcattctcagaaactgctctgcgatgtgtgcgttcaactctcagagtttaacttttcttttcattcagcagtttggaaacactctgtttgtaaagtctgcacatggatattttgaccacttagaggccttcgttggaaacgggtttctttcctgtaaggctagacagaagaattcccagtaacttccttgtgttgtgtacattcaactcacagagttgaacgttcccttagacacagcagatttgaaacactctttttgtgcaattggcaagtggagatttcaagcgctttaaggtcaatggcagtaaaagaaatatcttcgtttcaaaactagacagaatcattcccacaaactgcgttgtgatgtgttcgttcaactcacagagtttaacctttctgttcatagagcagttaggaaacactctgtttgtaaagtctgcaagtggatattctgacatcttgtggccttcgttggaaatgggatttcttcatattctgctagacagaagaattctcagtaacttccttgtgttgtgtgtattcaactcacagaattgaacgatcctttacacagagcagacttgaaacactctttttgtggaatttgcaattgtagatttcagccgctttgaggtcaatggtagaaaaggaaatatcttcgtatagaaacaagacagaatgattctcagaaactcctttgtgatgtgtgtgttcaactcacagagtttaacctttcttttcatagagcagttagtaaacactctgtttataaagtctgcaagtggatattcagacccctttgagtccttcgttggaaacgggatttcttcatattatgctagacagaagaattcccagtaacttccttgtgttgtgtgtgttcaactcacagagttgaactttcatttacacagagcagatttgaaacactctttttgtggaatttgcaagtggagatttcatgcgctttgaggccaaaggcagaaaaggaaatatcttcgtttcaaaactagacagaatcattctcagaaactgctgcgtgatgtgtgcgttcaactctcagagtttaacttttcttttcattcagcggtttggaaacactctgtttgtaaagtctgcacgtggaaattttgaccacttagcggccttcgttggaaacgggattttttcatgtaaggctagacagaagaattctcagtaacttccttgtgttgtgtgtattcaactcacagagttgaacgatcctttacacagagcagacttgaaacactctttttgtggaatttgcaagtggggatttcagccgctttgaggtcaatggtagaaaaggaaatatcttcgtataaagactagacagaatgattcgcagaaactcctttgtgatgtgtgcgttcaactcacagagtttaacctttcttttcatagagcagttaggaaacactctgtttgtaaagtctgcaagtggatattcagacctccttgaggccttctttggaaacgggatttcttcatattctgctagacagaagaattctcagcaacttccttgtgttgtgtgtattcaactcacagagttgaacgatcctttacacagagcagacttgaaacactctttttgtggaatttgcaagtggagatttcagccgctttgtggtcaatggtagaaaaggaaactatcttcgtataaagactagacagaatgattctcagaaactcctttgtgatgtgtgcgttcaaatcacagagtttaacttttcttttcatagagcagttaggaaaccctctgtttgtaaagtctgcaagtggatattcagacctctttgaggccttcgttggaaacgggatttcttcatattatgctagacagaagaattctcagtaacttccttgtgttgtgtatattcaactcacagagttgaatgatcctttacacagagcagacttgaaactctctttttgtggaatttgcaagtggagatttcagccgctttgaggtcaatggtagaaaagcaaatatcttcgtataaagactagacagaatgattctcagaaactcctttgtgatgtgtgcgttcaactcacagagtttaacctttcttttcatagagcagttaggaaacactctgtttctaaagtctgcaagtggatattcagacctccttgaggcattcgttggaaacgggatttcttcatattatgctagacagaagaattctcagaaacttccttgtgttgtgtgtattcaactcacagagttgaacgatcgtttacacagagcagacttgagacacactttttgtggaatttgtaagtggagatttcagccgctttgaggtcaatggtagaaaaggaaatatcttcatataaaaactagacagaatgattctcataactcctttgtgatgtgtgcgttcaactcacagagttcaacctctcttttcatagagcagttgggaaacactctgtttgtaaagtctgcaagtggatattcagacttctttgaggccttcgttggaaacgggatttcttcatattatgctagacagaagaattctcagtaacttccttgtgttgtgtttattcaacacacagagttgaatgatcctttacacagagcagacttgaaacactctttttgtggaatttgcaagtggagatttcagccgctttgaggtcaatggtagaataggaaatatcttcttatagaaactagacaaaacgattctcagaaactcctttgtgatgtgtgcgttcaactcacagagtttgacctttcttttcatagagcagttaggaaacactctgtttgtaaagtctgcaagtggatattcagacctctttgaggccttcgttggaaacgggatttcttcatattctgctagacagaataattctcagtaacttccttgtgttgtgtgtattcaactcacagatatgaaggatcctttacagagagcaggcttgaaacactctttttgtcgaatttgcaagtggagatttcagccgctttgaggtcaatggtagaataggaaatatcttcttatagaaactagacagaatgattctcagaaacttctttgtgatgtgtgcgttcaactcacagagtttaacctttcttttcatagagcagttaggaaacactctgtttgtaaactctgcaagtggatattcggacctctttgaggccttcgttggaaacgggatttcttcatactgtgctagacagaagaattcccagtaacttccttgtgttgtgtgtgttcaactcacagagttgaacttccatttacacagagcagatttgaaacactctttttgtggaatttgcaagtggagatttcaagcgctttgaggccaaaggcagaaaaggaaatatcttcgtttcaaaactagacataatcattctcagaaactgctctgcgatgtgtgctttcaactctcagagtttaacttttcttttcattcagaagtttggaaacactctgtttgtaaagtctgcacgtggataatttgaccacttagaggtcttcgttggaaacgggtttttttcatgtaaggctagacagaagaattcccagtaacttcgttgtgttttatgcattcaactcacagagttgaacgttcccttagacagagcagatttgaaacactctctttgtgcaatttgcaagtgtagatttcaagcgctttaaggtcagtggcagaaaaggaaatatcttcgtttcaaaactagacagaatcattcccacaaactgcgttgtgatgtgttcgttcaactcacagagtttaacttttctgttcatagagcagttaggaaacactctgtttgtaaagtctgcaagtggatattcagacctccttgaggccttcgttggaaacgggatttcttcatattctgctagacagaagaattctcagtaacttccttgtgttgtgtgtattcaactcacagagttgaacgatcctttacacacagcagacttgaaacactctttttgtggaatttgcaagtggagatttcagccgctttgaggtcaatggtagaaaaggaaactatcttcatataaagactagacagaatgattctcagaaactcctttgtgatgtgtgtgtccaactcacagagtttaacctttcttttcatagagcagttaggaaacactctgtttgtaaagtctgcaagaggatattcagacctctttgaggccttcggtggaaacgggtttttttcatataaggctagacagaataattctcagtaacttccttgtgttgtgtgtatccaactcacagagttgaaggatcctttacagggagcaggcttgaaacactctttttgtcgaatttgcaagtggagatttcagccgctttgaggtcaatggtagaataggaaatatcttcttatagaaactagacagaatgattctcagaaactcctttgtgatgtgtgcgttcaactcacagagttcaacctttcttttcatagagcagttaggaaacactctgtttgtaaagtctgcaagtggatattcagacatctttgaggctttcgttggaaacgggatttcttcatattctgctagaaagaagaattctcagaatcttccttgtgttgtgtgtattcaactcacagagttgaacgatccttcacacagagcagacttgaaacactctttttgtggaatttgcaagtggagatttcagccactttgaggtccatggtagaaaaggaaatatcttcgtataaaaactagacagaataattatcagaaaatcctttgtgatgtgtgcgttcaactcacagagtttaacttttcttttcatagagcagttaggaaacactctgtttgtaaagtctgcaagtggatattcagacctccttgaggccttcgttggaaacgggatttcttcatattctgctagacagaagaattctcagtaacttccttgtgttgtgtgtattcaactcacagagttgaacgatcctttacacagagcagacttgaaacactctgtttgtgaaatttgcaagtggagatttcagccgctttgaggtcaatagtagaaaaggaaatatcttcgtagaaaaactagacagaatgattctcagaaactcctttgtgatgtgtgtgttcaactcacagagtttaacctttcttttcatagagcagttcgtaaacactctgtttgtaaagtctgcaagtggatattcagacccctttgaggccttctttggaaacgggatttcttcatattatgctagacagaagatttcccagtaacttccttgtgttgtgtgtgttcaactcacagagttgaactttcatttacagagagcagatatgaaacactctttttgtggaatttgcaaatggagatttcaagcgctttgaggccaaaggcagaaaaggaaatatcttcgtataaaaactagacagaatcattctcagaaaatcctctgtgatgtgtgcgttcaactctcagagtttaacatttcttttcattcagcagtttgaaaacactctgtttgtaaagtctgcacgtggatattttgaccacttagaggccttctttggaaacgggtttttttcatgtaagtgtagacagaagaattcccagtaacttccttgtgttgtgtgcattcaactcacagagttgaacgttcccttagacagagcagatttgaaacactctttttgtgcaatttgcaagtggagatttcaagcgctttagggtcaatggcagaaaaggaaatatcttcgtttcaaaactagacagaatgattctcaggaactcctttgtgatgtgtgcgttcaactcacagagtttaacctttcttttcatagagcagttaggaaacactctgtttgtaaagtctgcaagtggatattcagacctccttgaggccttcgttggaaacgggatttcttcatattctgctagacagaagaattctcagtaacttccttgtgttgtgtgtattcaactcacagagttgaacgatcctgtacacagagcagacttgaaacactctttttgtggaatttgcaagtggagatttcagccgctttgaggtcaatggtagaataggaaatatcttcctatagaaactagacagaatgattctcagaaactcctttgtgatgtgtgcgttcaactcacagagtttaacctttcttttcatagagcagttaggaaacactctgtttgtaaagtctgcaagtggatattcagacctccttgaggccttcgttggaaacgagatttcttcatattatgctagacagaagaattctcagtaacttccttgtgttgtgtgtattcaactcacagagttgaacgatcctttacacagagcagacttgaaacactcttcttgtggaatttgcaagtggagatttcagccgctttgaggtcaatggtagaataggaaatatcttcgtataaaaactagacagaatgattctcagaaactcctttgtgatgtgtgcgttcaactcacagagtttaacttttcttttcatagatcagttaggaaacactctgtttgtaaagtctgcaagtggatattcagacctctttgaggccttcgttggaaacgggatttcttcatattctgctagacagaagaattctcagaatcttccttgtgttgtgtgtattcaactcacagagttgaacgatcctttacacagagcagacttgaaacactctttttgtggaatttgcaagtggagatttcagctgctttgacgtccatggtagaaaaggaaatatcttcgtataaaaactagacagaatgattctgagaaactcctttgtgatgtgtgcattcaactcacaaagtttatcctttcttttcatagagcagttaggaaacactctgtttgtaaagtctgcaagtggatattcagacctccttgaggccttcgttggaaacgggatttcttcatattctgctagacagaagaattctcagtaacttccttgtgttgtgtgttttcaactcacagagttgaacgatcctttacacagagcagacttgaaacactctttttgtggaatttgcaagtggagatttcagccgctttgaggtcaatggtagaataggaaatatcttcctacagaaactagacagaatgattctcagaaactcctttgtgatgtgtgcgttcaactcacacagtttaacctttcttttcatagagcagttagtaaacactctgtttgtaaagtctgcaagtggatattcagacctccttgaggccttcgttggaaacgggatttcttcatattatgctagacagaagaattcccagtaacttccttgtgttgtgtgtgttcaactcacagagttgaactttcatttacacagagcagatttgaaacactctttttgtggaatttgcaaatggagatttcaagcgctttgaggccaaaggcagaaaatgaaatatcgtcgtataaaaactagacagaatcattctcagaaactgctctgcgatgtgtgcgttcaactctcagagtttaacttttcttttcattcagcagtttggaaacactctgtttgtaaagtctgcgcgtggataatttgaccacttagaggccttcgttggaaacgggtttttttcatgtaaggctagacagaagaattctcagtaacttccttgtgttgtgtgtattcaactctcagagttgaacgatcctttacagagagcagactttaaacactctttttgtggaatttgcaagtggagatttcagccgctttgaggtcaatggtagaaaaggaaatatcttcgtataaagactagacagaatgattcgcagaaactcatttgtgatgtgtgtgttcaactcacagagtttaacctttcttttcatagagcagttaggaaacactctgtttgtaaagtctgcaagtggatattcagacctctttgaggccttcgttggaaacgggtttttttcatataaggctagacagaagaattctcggtaacttccttgtgttgtgtgtattcaactgacagagttgaactttcatttagagagatcagatttgaaacactgtttttgtggaatttgcaagtggagatttcaaacgcttaggggccaaacgcagaaaaggaaatatattcgtataaaaactagacagaatgattctcagaaactcctttgtgatgtgtgcgttcaactcacagagtttaacctttctgttcatagagcagttaggaaacactctgtttgtaaagtctgcaagtggatattcagacctccttgaggccttcgttggaaacggggtttcttcatattctgctggagagaagaattctcagcaacttccttgtgttgtgtgtattcaactcacagagttgaacgatcctttacacagagcagacttgaaacactctttttgtggaatttgcaagtggagatttcaggcgctttgaggtcaatggtagaaaaggaaactatcttcgtataaagactagacagaatgattctcagaaaatcctttgtgatgtgtgcgttcaaatctcagagtttaacttttcttttcatagagcagttaggaaacactctgtttgtaaagtctgcaagtggatattcagacctctttgaggccttcgttggaaacgggatttcttcatattatgctagacagaagaattctcagtaacttccttgtattgtgtgtattcaactgacagagttgaactttcatttagagagagcagatttgtaacactctttttgtggaatttgcaagtggagatttcaagcgctttgcggtcaatggcagaaaacgaaatatcatcgtataaaaactagacagaatcattctcagaaactgctctgcgatgtgtgcgttcaactctcagagtttaacttttgttttcattcagcagtttggaaacactctgtttgtaaagtctgcacgtggatattttgaccacttagaggccttcgttggaaacgggtttttatcctgtaaggctagacagaagaattctcagtaacttccttgtgttgtgtgtattcaactcacagagttcaacgatgctttgcacagaggagacttgaaacacactttttgttgaatttgcaagtggagatttcagccgctttgaggtcaatggtagaataggaaatatcttcctatagaaactagacagaatgattctcagaaactcctttgtgatgtgtgcgctcaactcacagagtttaacctttcttttcatagagcagttaggaaacactctgtttgtaaagtctgcaagtggatattcagacctctttgaggccttcgttggaaacgggatttcttcatattctgctaaacagaagaattctcagtaacttccttgtgttgtgtgtattcaactcacagagttgaacgatcctttacacaaagcagacttgaaacactctttttgtggaatttgcaagtggagatttcagccgctttgaggtcaatgttagaataggaaatatcttcctatagaaactagacagaaatgattctcagaaactcctttgtgatgtgtgcgttcaactcacagagtttaacctttcttttcatagagtagttaggaaacactctgtttgtaatgtctgccagtggatattcagacctctttgaggccatcgttggaaacgggatttcttcatattatgctagacagaagaattcccagtaacttccttgtgttgtgtgtgttcaactcacagagttgaactttcatttacacagagcagatttgaaacactctttttgtggaatttgcaagtggagatttcacgcgctgtgaggccaaaggcagaaaaggaaatatcttcgtataaaaactagacagaatcattctcagaaactgctctgcgatgtgtgcgttcaactctcagagtttaacttttcttttcattcagcagtttagaaacactctgtttgtaaagtctgcacgtggatattttgaccatttagaggctttcgttggaaacgggtttttttcttgtaaggctagacagaagaattcccaggaacttccttgtgttgtgtacattcaactcacagagttgaacgttcccttagacagagcagatttgaaacactctttttgtgcaattggcaagtggtgatttcagccgctttgaggtcaatggtagaaaaggaaatatcttcgtataaaaactagacagaatgattctcagaaacttcattgtgacgtgtgcgttcaactcacagagtttatcctttcttttcatagagcagttaggaaacactctgtttgtaaagtctgcaagtggatattcagacctctttgaggccttcgttggaaacgggatttcttcatactgtgctagacagaagaattctcagtaactgccttgtgttgtgtgtattcaactcacagagttgaacgatcctttacacagagcagacttgaaacactccttttgtggaatttgcaattggagatttcagccgctttgaggtcaatggtagaataggaaatatcttcctatagaaactagacagaatgattctcagaaactcctttgtgatgtgtgtgttcaactcacagagtttaacctttcttttcatagagcagttagtaaacactctgtttataaatctgcatgtggatattcagatctctttgaggccttcgttggaaacgggatttcttcatattatgctagacagaagaattctcagtaacttccttgtgttgtgtgtattcaactgacagagttgaactttcatttacagagagcagatttgaaacactgctttgtggaatttgcaagtggagatttcaagcgctttggggccaaaggcagaaaaggaaatatcttcgtataaaaactagacagaatgattctcagaaactcctttgtgacgtgtgcgttcaactcacagagtttaacttttcttttcatagagcagttaggaaacactctgtttgtaaagtctgcaagtggatattcagacctctttgaggccttcgttggaaacgggatttcttcatattctgctagacagaagaattctccctaacttccttgtgttgtgtgtattcaactcacagagttgaacgatcctttacacagagcagacttgaaacacactttttgtggaatttgcaattggagatttcagccgcgttgaggtcaatggtagaaaaggaaatatcttcgtataaaaactagacagaatcattctcagaaacttctttgtgatgtatgcgttcaactcacagagtttaaccttccttttcatagagcagttaggaaaccctctgtttgtaaactctgcaagtggatattcagacctctttgaggccttcgttggaaacgggatttcttcatactatgctagacagaagaattcccagtaacttccttgtgttgtgtgcgttcaactcacagagttgaactttgatttacacagagcagatttgaaacactctttttgtggaatttgcaagtggagatttcaagcgctttgaggccaaaggcagaaaaggaaatatcttcgtataaaaactagacagaatcattctcagaaactgctgcttgatgtttgcgttcaactctcagagtttaacttttcttttcattcagcggtttggaaacactctgtttgtaaagtctgcacgtggatattttgaccacttagaggccttcgttggaaacgggtttttttcatgtaaggctagacagaagaattcccagtaacttccttgtgttgtgtacattcaactcacagagttgaacgttcccttagacagagcagatttgaaacactctttttgtgcaattggcaagtggagatttcaagagttttaaggtcaatggcagaaaaggaaatatctgcgtttcaaaactagacagaatcattcccacagactgcgttgtgatgtgttcgttcaaatcacagagtttaacctttcttttcatagagcagttaggaaacagtctgtttgtaaattctgtaagtggattttctgacaacttgtggccttcgttggaaacgggatttcttcatattctgctagacagaagaattctcagtaacttccttgtgttgtgtgtattcaactcacagagttgaacgatcctttacacagagcagacttgaaacactctttttgtggaatttgcaagtggagatttcagccgctttgaggtcaaaggtagaataggtaatatcttcctatagaaactagacagaatgattctcagaaactcctttgtgatgtgtgcgttcaactcacagagtttaacctttctgttcacagagcagttaggaaacactctgtttgtaaagtctgcaagtggatattcagacctccttgaggccttcgttggaaacgggatttcttcgtattctgctagacagaagaattctcagtaacttccttgtgttgtgtgtattcaactgacagagttgaacgatcctttacacagagcagacttgaaacactctttttgtggaatttgcaagtggagatttcagccgctttgaggtcaatggtagaaaaggaaatatcttcgtataaagactagacagaatcattctcagaaactgctctgcgatgtgtgcgttcaactctcagagtttaacttttcttttcattcagcagtttggaaacactctgtttgtaaagtctgcacgtggatattttgaccatttagaggccttcgttggaaacgggtttttttcttgtaaggctagacagaagaattcccaggaacttccttttgttgtgtacattcaactcacagagttgaacgttcccttagacagagcagatttgaaacactctttttgtgcaattggcaagtggtgatttcagccgctttgaggtcaatggtagaaaaggaaatatcttcgtataaaaactagacagaatgattctcagaaactcctttgtgatgtgtgtgttcaactcacagagtttaacctttcttttcatagagcagttaggaaacactctgtttgtaaagtctgcaagtggatattcagacctctttgaggccttcgttggaaacgggtttttttcatattaggctagacagaagaattcccagtaacttccttgtgttgtgtgtgttcaactcacagagttgaacttcatttaaacagagcagatttgaaacactctttttgtggaatttgcaagtggagatttcaagcgctttgaggccaaaggcagaaaaggaaatatcttcgtaaaaaaatagaaagaatcattctcagaaactgctctgcgatgtgtgcgttcaactctcagagtttgacttttcttttcattcagcagtttggaaacactctgtttgtaaagtctgcacgtggaaaatttgaccacttagaggccttcattggaaacgggtttttttcatgtaaggctagacagaagaattctcagtaacttccttgtgttgtgtgtattgaactcacagagttgaacgatcctttacacagagcagacttgtaacactctttttgtggaatttgcaagtggagatttcagccactttgaagtcaaaggtagaaaaggaaatatcttcctataaaaactagacagaatcattccaagaaactgcgttgtcatgtgttcgttcaactcacagagtttaacctttctgttcatagagcagttaggaaacactctgtaaagtttgtaagtggatattctgacatcttgtggccttcgttggaaacgggatttcttcatattctgctagacagaagaattctcagtaacttccttgtgttgtgtgtattcaactcacagagttgaacgatcctttacacagagcagacttgaaacactcattttgtggaatttgcaagtggagatttcagccgctttgaggtcaatggtagaaaaggaaactatcttcatataaagactagacagaatgattctgagaaactcctttgtgatgtgtgcattcaactcacagagtttaacctttcttttcatagagcagttaggaaacactctgtttgtaaagtctgcaagtggatattcagacctccttgaggccttcgttggaaacgggatttcttcatattctgctagacagaataattctcagtaacttccttgtgttgtgtgtattcaactcacagagttgaaggatcctttacagagagcaggcttgaaacactctttttgtcgaatttgcaagtggagatttcagccgctttgaggtcaatggtagaataggaaatatcttcttatagaaagtagacagaacgattctcagaaactcctttgtgatgtgtgcgatcaactcacagagtttaacctttcttttcatagagcagttaggaaacactctgtttgtaaagtctgcaagtggatattcagacctccttgaggccttcgttggaaacgggatttcttcatattctgctagacagaagtattctcagtaacttccttgtgttgtgtgtattcaactcacagagttgaacgatcctttacaaagagcagacttgaaacactctttttgtggaatttgcaagtggagatttcagccgctttgaggtccatggtagaaaaggtaatatcttcctataaagactagacagaatgattctcagaaactcctttgtgatgtgtgcgttcaactcacagagtttaacctttctgttcatagagcagttaggaaacactctgtttgtatagtctgcaagtggatattcagacctccttgaggccttcgttggaaacgggatttcttcatattctgctagacagaagaattctcagtaacttccgcgtgttgtgtgtattcaactcagagagttgaacgatcctttacacagagcagacttgaaacactctttttgtggaatttgcaagtggagatttctgccgctttgaggtcaatggtagaaaaggaaatatcttcctataaaaactagacagaatgattctcataaactcctttgtgatgtgtgcattcaactcactgagtttcacctttcttttcatagagcagttaggaaacactctgtttgtaaagtctgcaagtggatattcagacctccttgaggccttcgttggaaacgggatttcttcatattctgctagacagaagaattctcagtaacttccttgtgttgtgtgtattcaactcacagagttgaacgatcctttacacagagcagacttgaaacactctttttgtggaatttgcaagtggagatttcagctgctttgaggtcaatggtagaaaaggaaatatcttcgtataaagactagacagaaatcattctcagtaaactgctctgcgatgtgtgcgttcaactctcagagtttaacttttcttttcattcagcagtttggaaacactctgtttgtaaagtctgcacgtggataacttgaccacttagaggacttcgttggaaacgggtttttttcctgtaaggctagacagaagaattcccactaacttccttgtgttgtgtacattcaactcacagaggtgaacgttcccttagacagagcagatttgaaacactctttttgtgcaattggcaagtggagatttcaagcgctttaaggtcaatggtagaaaaggaaatatcttcgtttcaaaactagacagaatgattctcagaaactcctttgtgatgtgtgcgttcaactcacagagtttaacctttcttttcatagagcatttgggaaacgctctgtttgtaaagtctgcaagtggatattcagacttctttgaggtcttcgttggaagcgggatttcttcatattctgctagacagaagaattctcagtaacttccttgtgttgtgtgtattcaactcacagagttgaacgatcctttacacagagcagacttgaaacactctttttgtggaatttgcaagtggagacttcagccgctttgaggtcaatggtagaataggaaatatcttcccatagaaactagacagaatgattctcagaaactcctttgtgatgtgtgcgttcaactcacagagtttaaccttccttttcatagagcagttaggaaacactctgtttgtaaagtctgcaagtgtatattcagacatccttgaggctttcgttggaaacgggatttcttcatattctgctagaaagaagaattcccagtaacttccttgtgttgtgtgtgttcaactcacagagttgaactttcatttacacagagcagatttgaaacactctttttgtggaatttgcaagtggagatttcaagcgctttgaggccaaaggcagaaaaggaaatgtcttcgtttcaaaactagacagaatcattctcagaaactgctctgcgatgtgtgcgttcaactctcagagtttaacttttcttttcattcagaagtttggaaacactctgtttgtaaagtgtgcacgtggataacttgaacacttagaggccttcgttggaaacgggtttttttcatgtaaggctagacagaagaattcccactaacatccttgtgttgtgtgtgttcaactcacagagttgaactttcatttacacagagcagatttgaaagactctttttgtgcaatttgcaaatggagatttcaagcgctttgaggccaaagacagaaaaggaaatatcttcgtttcaaaactagacagaatcattcccacaaactgcgttgtgatgtgttcgttcaactcacagagtttaacctttctgttcatagagcagttaggaaacactctgtttctaaagtctgtaagtggatattctgacatcttgtggccttcgttggaaacggggtttcttcatattctgctagacagaagaattctcagtaacttccttgtgttgtgtgtattcaactcacaccgttgaacgatcctttatacagagcagacttgaaacactgtttttgtggaatttacaagtggagatttcagccgatttgaggtcaatggtagaaaaggaaatatcttcctatagaaactagacagaatgattctcagaaactcctttgggatgtgtgtgtccaactcacagagtttaacctttcttttcatagagcagttaggaaacactctgtttgtaaagtctgcaagaggatattcagacctctttgaggccttcgttggaaacgggtttttttcatataaggctagacagaagaattcccagtaacttccttgtgttgtgtgtgttcaactcacagagttgaactttcatttacacagagcagatttgaaacactctttttgtggaatttgcaggtggagatttcaagtgctttgaggccaaaggcagaaaaggaaatatcttcgtataaaaactagacagaatgattctcagaaactcctttgtgatgtgggtgttcaactcacagtgtttaacctttcttttcatagagcagtttggaaacactctgtttgaaaagtctgcacgtgtataatatgaccacttagaggccttcgttggaaacgggttttttttcatgtaaggctagacagaagaattcccagtaacttccttgtgttgtgtgcattcaactcacagagttgaacgttcccttagacagagcagatttgaaacactctatttgtgcaatttgcaagtgtagttttcaagctctttaaggtcaacagcagaaaaggaaatatcttcgtttcaaaactagacagaatcattcccacaaactgcgttgtgatgtgttcgttcaactcacagagtttaacctttcttttcatagagcagttaggaaacagtgggtttgtaaattctgtaagtggatattctgacatcttgtggccttcgttggaaacgggatttcttcatattctgctagacagaagaattctcagaaacttccttgtgttgtgtgtattcaactcacagagttgaacgatcctttacacagagcagacttgaaacactctttttgtggaatttgcaagtggagatttctgccgctttgaggtcaatggtagaatagtaaatatcttcctatagaaactagacagaatggttctgagaaatcctttgtgaggtgtgcgttcaactcacagagtttaacctttcttttcatagagcagttaggaaacactctgtttttaaagtcttcaagtggatattcagacctccttgaggccttcgttggaaacgggatttcttcatattatgctagacagaagaattctcagtaacttccttgtgttgtgtgtattcaactcacagagttgaacgatcctttacacagagcagacttgaaacactctttttgtggaatttgcaagtggagatttcagccgctttgaggtcaatagtagaaaaggaaatatcttcatagaaaaactagacagaatgattctcagaaactcctttgtgctgtgtgcgttcagctcacagagtttaacctttcttttcatagagtagttaggaaacactctgtttgtaaagtctgcaagtggatattcagacatctttgaggccttcgttggaaacgggatttcttcatattctgctagacagaagaattctcagtaacttccttgtgttgtgtgtattcaactgacagagttgaactttcatttagagagagcagatttgtaacactgtttttgtggaatttgcaagtggagatttcaagcgctttggggccaaaggcagaaaaggaaatatcgtcgtataaaaactagacagaatcattctcagaaactgctgcgtgatgtgtgcgttcaactctcagagtttaacttttcttttcattcagcggtttggaaacactctgtttgtaaagtctgcacgtggaaattttgaccacttagaggccttctttggaaacgggtttttttcatgtaaggctagacagaagaattcccagtaacttccttgtgttgtgtgcattcaactcacagagttgaacgttcccttagacagagcagatttgaaacactctatttgtgcaatttgcaagtgtagttttcaagctctttaaggtcaacggcagaaaaggaaatatcttcgtttcaaaactagacagaatgattctcagaaactcctttgtgatgtgtgtgttcaactcacagagtttaacctttcttttcatagagcagttactaaacactctgtttataaagtctgcaagtggatattcagacccctttgaggccttcgttggaaacgggatttcttcatattatgctagacagaagaattctcagtaacttccttgtgttgtgtgtattcaactcacagagttgaacgaacctttacacagagcagacttgaaacactctttttgtggaatttgcaagtggagatttcatcccctttgaggtcaatggtagaaaaggaaatatcttcgtataaaaactagacagaatgattctcataaacttctttgtgatgtgtgcgttcaactcacagagtttaacctttcttttcatagagcagttaggaaacactctgtttgtaaactctgcaagtggatattcagacctctttgaggccttcgttggaaacgggatttctccatactgtgctagacagaagaattcccagtaacttccttgtgttgtgtgtgttcaactcacagagttgaactttcatgtacacagagcagatttgaaacactctttttgtggaatttgcaaatggagatttcaagcgctttgaggccaaaggcagaaaaggaaatatcttcgtataaaaactagacagaaatcattctcagaaactgctctgcgatgtgtgcgttcaactctcaggagtttaacttttcttttcattcagcagtttggaaacactctgtttgtaaagtctgcacgtggatattttgaccacttagaggccttcgttggaaacgggtttttttcctgtaaggctagacagaagaattcccagtaacttccttgtgttgtgtacattcaactcacagagttgaacgttcccttagacagaacagatttgaaacactctttttgtgcaattggcaaatggagatttcaagcgctttgaggtcaatggtagaaaaggaaatatcttcgtttcaaaactagacagaatcattcccacaaactgcgttgtgatgtgttcgttcaactcacagagtttaacctttcttttcatagagtagttaggaaacagtctgtttgaaaattctgtaagtagatattctgacagcttgtggccttcgttggaaacgggatttcttcatattctgctagacagacgaattctcagtaacttccttgtgttgtgtgtattcaactcacagagttgaacgatcctttacacagagcagacttgtaacactctttttgtggaatttgcaagtggagatttcagcccctttgaagtcaaaggtagaaaaggaaatatcttcctataaaaactagacagaatgattctcagaaacttctttttgatgtgtgcgttcaactcacagagtttaacctttcttttcatagagcagttaggaaacactctgtttgtaaactctgcaagtggatattcagacctgtttgaggccttcgttggaaacgggatttcttcatactatgctagacagaagaattctcagtaacttccttgtgttgtgtgtattcaactcacagagttgaacgatcctttacacagagcggacttgaaacacactttttgtggaatttgcaagtggagatttcagccgcgttgaggtcaatggtagaaaaggaaatatcttcgtttcaaaactagacagaatgattctcagaaactcctttgtgatgtgtgcgttcaactcacagagtttcacttttcttttcatagagcagttaggaaacactctgtttgtaaagtctgcaagtggatattcagacctctttgaggccttcggtggaaacgggatttcttcatattatgctagacagaagaattcccagtaacttccttgtgttgtgtgtgttcaactcacagagttgaactttcatttacacagagcagatttgaaacactcttttcgtgaaatttgcaagtggagatttcaagcgctttgaggccaaaggcagaaaaggaaatatcttcgtataaaaactagacagaataattctcagaaactgctctgtgatgtgtgcgttcatctctcagagtttaactgttcttttcattcagcagtttggaaacactctgtttgtaaagtctgcacgtggatattttgaccacttagaggccttcgttggaaacgggtttttttcatgtaaggctagacagaagaattcccagtaacttccttgtgttgtgtacattcaactcacagagttgaacgttcccttagacagagcagatttgaaacactctttttgtgcaattggcaagtggagatttcaagcgctttaaggtcaatggcagaaaaggaaatatcttcgtttcaaagctagacagtatgattctcagaaacttctttgtgatgtgtgcgttcaactcacagagtttaacctttcttttcatagagcagttaggaaacactctgtttgtaaactctgcaagtggatattaagacctctttgaggccttcgttggaaacgggatttcttcatactgtgctagacagaagaattctcagtaacttccttgtgttgtgtgtattcaactcacagagttgaacgatcctttacacagagcggaattgaaacactctttttgtgaaacttgcaagtggagatttcagccgcgttgaggtcaatggtagaaaaggaaatctcttcgtataaaaactagacagagtgattctcagaaactcctttgtgatgtctgcgttcaactcaccgagtttaacctttcttttcatagagcagttaggaaacactctgtttgtaaagtctgcaagtggatattcagacctccttgaggccttcgttggaaacgggatttcttcatattctgctatacagaagaattcccagtaactttccttgtgttgtgtgtgttcaactcacagagttgaactttcatttacacagagcagatttgaaacactctttttgtggaatttgcaagtggagatttcaagcgctttgaggccaaaggcagaaaaggaaatatctccgtttcaaaactagacagaatcattctcagaaactgctctgcgatgtgtgcgttcaactctcagagtttaacttttcttttcattcagcagtttggaaacactctgtttgtaaagtctgcacgtggatattttgaccatttagaggccttcgttggaaacgggttttttttcttgtaaggctagacagaagaattcccaggaacttccttgtgttgtgtacattcaactcacagagttgaacgttcccttagacagagcagatttgaaacactctttttgtgcaattggcaagtggtgatttcagccgctttgaggtcaatggtagaaaaggaaatatcttcgtataaaaactagacagaatcattcccacaaactgcgttgtgatgtgttcgttcaactcacagagtttaacctttctgttcatagagcagttaggaaacactctgtttgtaaagtctgcaagtggatattcagacctctttgaggccttcgttggaaacgggatttcttcatattctgctagacagaagaattctcagtaacttcattgtgttgtgtgtattcaactcacagatttcaacgatcctttacacagagcagacttgaaacactctttttctggaatttgcaagtggagatttcagccgctttgaggtcaatggtagaataggaaatatcttcctatagacactagacagaatgattctcagaaactcctttatgatgtgtgcgttcaactcacagagtttaacctttctgttcatagagcagttaggaaacactctgtttgtaaagtctgcaagtggatattcagacctccttgaggccttcggtggaaacgggatttcttcatattctgctagacagaagaattctcagtaacttccttgtgttgtgtgtattcaactcacagagttgaacgatcctttacacagagcagacttgaaacactctttttgtggaatttgcaagtggagatttcagccgatttgagttcaatggtagaataggaaatatcttcctatagaaactagacagaatgattctcagaaactcctttgtgatgtgtgcgttcaactcatagagtttaacctttcttttcatagagcagttaggaaacactctgtttgtaaagtctgcaagtggatattcagacctctttgaggccatcgttggaaacgggatttcttcatattctgctagagagaagaattctcagtaacttccttgtgttgtgtgtattcaactcacagagttgaacgatcctttacacagagcagacttgaaactctctttttgtggaatttgcaagtggagatttcagccgctttgaggtcaatagtagaaaagtaaatatcttcgtagaaaaactagacagaatgattctcagaaactcttttgtgatgtgggcgttcaactcacagagtttaaccattcttttcatagagcagttaggaaacactctgtttgtaaagtctgcatgtggatatttggacttctttgaggccttcgttggaaacgggtttttttcatgtaaggctagacagaagaattctcagtaacttccttgtgttttgtgtattcaactcacagagttgaacgatcctttacacagagcagacttgaaacactctttttgtggaatttgcaagtggatatttcagccgctttgagttcaatggtagaataggaaatatcttcctatagaaactagacagaatgattctcagaaactcctttgtgatgtgtgcgttcaactcacagatttcaacctttcttttcatagagcagttgggaaacactctgtttgtaaagtctgcaagtggatattcagacttctttgaggccttcgttgaaagcgggatttcttcatattctgctagacagaagaattctcagtaacttccttgtgttgtgtgtattcaactcacagagttgcacgatcgtttacacagagcagacttgaaacactctttttgtggaatttgcaagtggagatttcagccgctttgaggtcaatagtagaaaaggaaatatcttcgtagaaaaactacacagaatgattctcagaaactcctttgtgatgtgggtgttcaactcacagagtttaacctttcttttcatagagcagttaggaaacactctgtttgtaaagtctgcaagtggatattttcacctctttgaggccttcattggaaacgggttttttttcatgtaaggctagacagaagaattctcagtaacttccttgtgttgtgtgtattcaactgacagagttgaactttcatttagacagagcagatttgaaacactctttttctggaatttgcaagtggagatttcaagcgctttgaggccaaaggcagaaaaggaaatatcttcgtataaaaactacacagaatcattctcagaaactgctctgcgatgtgtgcgttcaactctcagagtttaacttttcttttcattcagcagtttggaaacactctgtttgtaaagtctgcacgtggatattttgaccatttagaggccttcgttggaaacgggttttgtccttgtaagcctagacagaagaattcccagtaacttccttgtgttgtgtgcattcaactcacagagttgaacgttcccttagacagagcagatttgaaacactctatttgtgcaatttgcaagtgtagttttcaagctctttaaggtcaacggcagaaaaggaaatatcttggtttcaaaactagacagaatgattctcagaaactcctttgtgatgtgtgcgttcaactcacagagtttaaccttactgttcatagagcagttaggaaacactctgtttgtaaagtctgcaagtggatattcagacctctttgaggccttcgttggaaacgggatttcttcatattatgctagacagaagaattctcagtaacttccttgtgttgtgtgtattcaactcacagagttgaacgatcctttacacagagcagacttgaaacactctttttgtggaatttgcaagtggagatttcagccgctttgagttcaatggtagaataggaattatcttcctacagaaactagacagaatgattctcagaaactcctttgtgatgtgtgtgttcaactcacagagtttaagctttcttttcatagagcagttagtaaacactctgtttataatgtctgcaagtggatattcagacccctttgacgccttcgtttgaaacgggatttcttcatattatgctagacagaagaattctcagtaacttccttgtgttgtgtgtattcaactgacagagttgaactttcatttagagagagcagatttgaaacactgtttttgtggaatttgcaagtggagatatcaagcgccttggggccaaaggcagaaaaggaaatatcttcgtataaaaagtagacagaatgattctcagaaacttctttgtgatgtgtgcgttcaactcacagagtttaacctttcttttcatagagcagttaggaaacactctgtttgtaaactatgcaagtggatattcagacctctttgaggccttcgttggatacgggatttcttcatactatgctagacagaagaattctcagtaacttcccttgtgttgtgtgtattcaactcacagagttgaacgatcctttacacagagcagacttgaaacattctttttgtggaatttgcaaggggagatttcagccgctttgaggtcaatggtagaataggaaatatcttcctatagaaactagacagaatgattttcagaaactgctttgtgatgtgtgcgttcaactcacagagtttcacctttcttttcatagagcagttaggaaacactctgtttgtaaagtctacaagtggatattcagacctctttgaggccttcgttggaaacgggatttcttcatattatgctagacagaagaattctcagtaacttccttgtgttgtgtgtattcaactgacagagttgaactttcatttggagagagcagatttgaaacactgtttttttggaatttgcaagtggagatttcaagcgctttggggccaaaggcagaaaaggaaatatcttcgtataaaaactagacagaatcattctcagaaactgctctgtgatgtgtacgttcaactctcagcagtttaacttttcttttcattcagcagtttggaaacactctgttcgtaaagtctgcacgtggataatttgaccacttagaggccttcgttggaaacgggtttttttcatgtaaggctagacagaagaattctcagtaacttccttgtgttgtgtgtattcaactcacagaattgaacgatcctttacacagagcagacttgaaacactctttttgtggaatttgcaagtggagatttcagccgctttgaggtcaatagtagaaaaggaaatatcttcgtagaaaaactagacagaatgattctcagaaaatgttttgtgatgtgtgcgttcaactcacagagtttaacttttcttctcatagagcagttaggaaacactctgtttgtaaagtctgcaagtggatattgagacctctttgaggccttcgttggaaacgggatttcttcatattatgctagacagaagaattctcagtaacttccttgtgttgtgtgtattcaactgacagagttgaactttcatttagagagagcagatttgaaacactgtttttgtggaatttgcaagtggagatttcaagcgctttgaggtcaatggtagaataggaaatatcttcctatagaaactagacagaatcattctcagaaactgctgcgtgatgtgtgagttcaactctcagagtttaacttttcttttcattcagcggtttggaaacactctgtttgtaaagtctgcacgtggaaattttgaccacttagaggccttcgttggaaacgggttttcttcatgtaaggctagacagaagaattcccagtaacttccttgtgttgtgtacattcaactcacagagttgaacgttcccttagacagagcagatttgaaacactctttttgtgcaattggctagtgttgatttcagccgctttgaggtcaattgtataaaaggatatatcttcatataaaaactagacagaatgattctcagaaactcctttgtgatgtgtgcgttcaactcacagagtttaacctttctttccatagagcagttaggaaacactctgtttgtaaagtctgcaagtggatattcagacctctttgaggccttcgttggaaacgggtttttttcttataaggctagacagaagaattctcagtaacttccttgtgttgtgtgtattcaactcacagagttgaacgatcctttacacagagcagacttgaaacactctgtttgtggaatttgcaagtggagatttcagccgctttgaggtcaatagtagaaaaggaaatatcttcgtagaaaaactagacagaatgattctcagaaactcctttgtgatgtgtgcgttcaactcacagagtttaaactttcttttcatagagcagttaggaaacactctgtttgtaaagtctgcaagtggatattcagacctctttgaggccttcgttggaaacgggtttttttcatataaggctagacagaagaattcccagtaacttccttgtgttgtgtgtgttcaactcacagagttgaactttcatttacacagaaaagatttgaaacactctttttgtggaatttgcaagtggagatttcaagcgctttgaggccaaaggcagaaaaggaaatatctccgtttcaaaactagacagaatcattctcaaaaactgctctgcgatgtttgcgttcaactctcagagtttaacttttcttttcattcagcagtttggaaacactctgtttgtaaagtctgcacgtggataacttgaccacttagaggacttcgttggaaacgggtttttttcctgtaaggctagacagaagaattcccagtaacttccttgtgttgtgtacattcaactcacagagttgaacgttcccttagacagagcagatttgaaacactctttttgtgcaattggcaaatggagatttcaagcgctttaagttcaatggcagaaaaggaaatatcttcgtttcaaaactagacagaatcattctcagaaactgctctgcgatgtgtgcgttcaactctcagagtttaacttttcttttcatagagcagttaggaaacagtctgtttgtcaattctgtaagtggatattctgacatcttgtggccttcgttggaaacgggatttcttcatattctgctagacagaagaattctcagaatcttccttgtgttgtgtgtattcaactcacagatttgaacgatcctttacacagagcagacttgaaacactctttttgtggaatttgcaagtggagatttcagccgctttgaggtccatggtagaaaaggaaatatcttcgtataaaaactagacagaatgattctcagaaactcctttgtgatgtgtgcgttcaactcacagagtttaacctttcttttcatagagcagttaggaaacactctgtttgtaaagtctgcaagttgatattcagacctctttgaggccttcgttggaaacgggatttcttcatattatgctagacagaagaattctcagtaacttccttgtgttgtgtgtattcaactcacagagttgaacgatcctttacacagagcagacttgaaacactctttttatggaatttgcaagtggagatttcagccgctttgaggtcaatggtagaaaaggaaatatcttcgtataaaaactagacagaatgattctcataaactcctttgtgatgtgtgcgttcaactcacagagtttaacctttcttttcatagagcagttaggaaacactctctttgtgaagtctgcaagtggatattcagacctccttgaggccttcgttggaaacgggatttcttcatattctgctagacagaagaattctcagtaacttccttgtgttgtgtttattcaactcacagagttaatgatcctttacacagagcagacttgaaacactctttttgtggcatttgcaagtggagatttcagccgctttgaggtcaatggtagaaaagtaaatatcttcgtataaagactagacagaatcattctcagaaactgctctgcgatgtgtgcgttcaactctcagagttcaacttttcttttcattcagcagtgtggaaacactctgtttgtaaagtctgcacgtggatattttgaccacttagaggcctttgttggaaacgggtttttttcctgtaaggctagacagaagttttcccagtaacttccttgtgttgtgtacattcaactcacagagttgaacgttcccttagacagagcagatttgaaacactctttttgtgcaattggcaaatggagatttcaagcgctttaaggtcaatggcagaaaaggaaatatcttcgtttcaaaactagacagaatcattcccacaaactgcgttgtgatgtgttcgttcaactcacagagtttaacctttctgttcatagagcagttaggaaacactctgtttgtaaagtctgtaagtggatattctgacatcttgtggccttcgttggaaacgggatttcttcatattatggtagacagaagaattctcagtaacttccttgtgttgtgtgtattcaactcacagagttaaacgatcctttacacagagcagacttgaaacactctttttgtggaatttgcaagtggagatttcagccgctttgaggtcaatggtagaaaaggaaactatcttcatataaacactagacagaatgattctcagaaactcctttgtgatgtgtgtgttcaactcacagagtttaacctttcttttcatagagcagttagtaaacactctgtttataaagtctgcaagtagatattcagacccctttgaggccttcgttggaaacgggatttcttcatattatgctagacagaagaattctcagtaacttcccttgtgttgtgtgtattcaactcacagagttgaacgatcctttacacagagcagagttgaaacattctttttgtggaatttgcaagtggagatttcagccgctttgaggtcaatggtagaatagcaaatatcttcctatagaaactagacagaatgattctcagaaactcctttgtgatgtgtgcattcaactcacagagtttaacctttcttttcatagaacagttaggaaacactctgtttgtaaagtcttcaggtggatattcagacctcttagaggccttcgttggaaacaggatttcttcatattatgctagacagaagaattctcagcaatcttccttgtgttgtgtgtattcaactcacagagttgaacgatggtttacacagagcagatttgaaacactctttttgtggaatttgcaagtggagatttcagccgctttgaggtcaatggtagaaaaggaaatatcttcctataaaaactagacagaatgattctcagaaactcctttgtgatgtgtgcgttcaactcacagagtttcacttttcttttcatagagcagttacgaaacactctgtttgtaaagtcttcaagtggatattcagacctctttgaggccttcgttggaaacgggatttcttcatattctgctacacagaagaattctcagtaacttccttgtgttgtgtgtattcaactcacagagttgaacgatcctttacacagagcagacttgaaacactctttttgtggaatttgcaagtggagatttcagccgctttgaggtcaatggtagaaaaggaaactatcttcatataaagactagactgaatcattctcagaaactgctctgtgatgtgtgcattcaactctcagagtttaacttttcttttcattcagcagtttggaaacactctgtttgtaaagtctgcacgtggataatttgaccacttagaggccttcgttggaaacgggtttttttcatgtaaggctagacagaagaattctcagtaacttccttgtgttgtgtgtattcaactcacacagttgaacgatcctttacacagagcagacttgtaacacactttttgtggaatttgcaagtggagatttcagccgctttgaagtcaaaggtagaaaaggaaatatcttcctataaaaactagacagaatgattctcagaaactcctttgtgatgtgtgcgttcaactcacagagtttaacctttcttttcatagagcagttaggaaacactctgtttgaaaagtctgcaagtggatattcagacctcttagaggccttcgttggaaacgggatttcttcatattatgctagacagaagaattttcagtaacttccttgtgtagtgtgtattcaactcacagagttgaacgatcctttacacagagcagacttgaaacactctttttgtggaatttgcaagtggagatttcagccgctttgaggtcaatggtagaaaaggaaatatcttcgtataaagacaagacagaatgattctcagaaactcctttgtgatgtgtgcgttcaactcacagagtttaacctttcttttcatagagcacttaggaaacactctgtttgtaaagtctgcaagtggatattcagacctctttgaggccatcgttggaaacgggatttcttcatattctgctagacagaagaattctcagtaacttccttgtgttgtgtgtattcaactcacagagttgaacgatcctttacacagagcagacttgaaacactctttttgtggaatttgcaagtggagatttcacccgctttgaggtcaatggtagaaaaggaaatatcttcgtataaagactagactgaatgattctcagaaactcctttgtgatgtgtgcgttcaactcacagagtttaacctttcttttcatagagcagttaggaaacactctgtttgtaaagtctgcaagtggatattcagacctccttgaggccttcattggaaacaggatttcttcatattctgctagacagaagaattctcagtaacttccttgtgttgtgtgtattcaactcacagagttgaacgatcctttacagcagagcagacttgaaacactctttttgtggaatttgcaagtggagatttcagccgctttgaggtcaatggtagaaaaggaaatatcttcctataaagactagacagagtgattctcagaaactcctttgtgatgtctgcgttcaactcacagagtttaacctttcttttcatagagcagttaggaaacactctgtttgtaaagtctgcaagtggatattcagaccttcttgaggccttcgttggaaacgggatttcttcatattatgctagacagaagaattctcagtaacttccttgtgttctctgtattcaactcacagagttgaacgatcctttacagagagcagacttgaaacactctttttgtggaatttgcaagtggagatttcagccgctttgaggtcaatggtagaaaaggaaatatcttcgtataaagactagacagaatgattctcagaaactcctttgtgatgtgtgcgttcaactcacagagtttaacctttgttttcatagagcagttaggaaacactctgtttgtaaagtctgcaagtggatattcagacatctttgaggccttcgttggaaacgggatttcttcatgttctgctggacagaagaattctcagaatcttccttgtgttgtgtgtcttcaagtcacagagttgaacaatggtttacacagagcagatttgaaacactctttttgtggaatttgcaagtggagatttcagccgctttgaggtcaatggtagaaaaggaaatatcttcgtataaaaactagacagaatgattctcagaaactcctttatgatgtgtgcgttcaactcacagagtttaacctttcttttcatagagcagttaggaaacactctgtttgtaaactctgcaagtggatattcagacctctttgaagccttggttggaaacgggatttcttcatattatgcctgagagaagaattctcagtaactgccttgtgttgtgtgtattcaactcacagagttgaatgatcctttacacagagcagacttgaaacactccttttgtggaatttgcaagtggagatttcagccgctttgaggtcaatggtagaataggaaatatcttcctatagaaactagacagaatgattctcagaaactcctttgtgatgtgtgtgttcaactcacagagtttaacctttcttttcatggagcagttaggaaacactctgtttgtaaagtctgcaaggggatattcagacctctttgaggcttccgttggaaacgggatttcttcatattctgctagacagaagaattctcagtaacttcattgtgttgtgtgtattcaactcacagagttgaacgatcctttacacagagcagacttgaaacactctttttgtggaatttgcaagtggagatttcagccgctttgaggtcaatggtagaaaaggaaatatcttcgtataaagactagacagaatgattctcagaaactcctttgcgatgtgtgcattcaactcacagagtttaacctttcttttcacagagcagttaggaaacactctgtttgtaaagtctgcaagtggatattcagacctccttgaggccttcgttggaaacgggatttcttcatattatgctagacagaagaattctcagaaacttccttgtgttgtgtgttttcaactcacagagttgaacgatggtttacacagagtagacttgaaacactctttttgtgtaatttgcaagtggagatttcagccgctttgaggtcaatggtagaaaaggaaatatcttcgtataaaaagtagacagaatgattctcagaaactcctttgtgatgtgtgcgttcaactcacagagtttaacttttcttttcatagagcagttaggaaacactctgtttgtaaaatctgcaagtggatattcagacctctttgaggccttcgttggaaacgggatttcttcatattatgctagacagaagaattcccagtaacttccttgtgttgtgtgtgttcaactcacagagttgaactttcatttacacagagcagatttgaaacactctttttgtggaatttgcaagtggagatttcaagcgctttgaggccaaaggtagaaaaggaaatatcttcgtataaaaactagacagaatcattctcagaaactgctgcgtgatgtgtgcgttcaactctcagagtttaacttttcttttcattcagcggtttggaaacactctgtttgtaaagtctgcacgtggatattttgaccacttagaggccttcgttggaaacgggtttcttgcatgtaaggctagacagaagaattcccagtaacttccttgtgttgtgtgtattcaactcacagagttgaacgttcccttagacggagcagatttgaaacactctatttgtgcaatttgcaagtgtagatttcaagcgctttaaggtcaatggcagaaaaggaaatatcttcgtttcaaaactagacagaatcattcccacaaactgcgttgtgatgtgttcgttcaactcacagagtttaacctttctgttcatagagcagttaggaaacactctgtttgtaaagtctgtaagtggatattctgacatcttgtggccttcgttttaaacgggatttcttcatattgtgctagacagaagaattctcagtaacttccttgtgttgtgtgtattcaactcacagagttgaactatcctttacagagagcagacttcaaacactctttttgtggaatttgcaattggatatttcagccgctttgaggtcaatggtagaaaaggaaatatcttcgtataaagactagacagaatgattctcagaaaatcttttgtgatgtgtgcgttcaactcacagagtttaacttttcttctcatagagcagttaggaaacactctgtttgtaaagtctgcaagtggatattcagacctctttgaggccttcgttggaaacgggattttttcatattatgctagacagaataattctcagtaacttccttgtgttctgtgtattcaactcacagagttgaacgatcctttacagagagcagacttgaaacactctatttgtggaatttgcaagtggagatttcagccgcattgaggtcaatggtacaaaaggaaatatcttcgtataaagactagacagaatgattctcagaaactcctttgtgatgtgtgcgttcaactcacagagtttaacctttcttttcatagagcagttaggaaacactctgtttctaaagtctgcaagtggatattcagacatccttgaggctttcgttggaaacgggatttcttcatattctgctagaaagaagaattctcagtaacttccttgtgttgtgtgtattcaactcacagtgttgaacgatcctttacacagagcagacttgaaacactctttttgtggaatttgcaagtggagatttcagccgctttgagttcaatggtagaataggaaatatcttcttatagaaactagacagaatgattctcagaaactcctttgtgatgtgtgcgttcaactcacagagttcaacctttcttttcatagagcagttgggaaacactctgtttgtaaagtctgcaagtggatattcagatttctttgaggccttcgttggaagcgggatttcttcatgttctgctagacagaacaattctcagtaacttccttgtgttgtgtgtattcaactcacagagttgaacgatcctttacacagagcagacttgaaacactctttttgtggaatttgtaagtggagatttcagccgctttgaggtcaatagtagaaaaggaaatatattcgtagaaaaactagacagaatgattctcataaactcctttgtgatgtgtgcgttcaactcacagagtttaacctttcttttcatagagcagttaggaaacactctgtttgtaaagtctgcaagtggatattcagacctcgttgaggccttcgttggaaacgggatttcttcatattctgctagacagaagaattctcagtaacttccttgtgttgtgtgtattcaactcacagagttgaacgatcctttacacagagcagactttaaatactctttttgtggaatttgcaagtggagatttcagccgctttgagttcaatggtagaataggaaatatcttcctatagaaactagacagaatgattctcagaaactcctttgtgatgtgtgcgttcaactcacagagtttaacctttcttttcatagagcagttaggaaacactctgtttgtatagtctgcaagtggatattcagacctctttgaggccttcgttggaaacgggtttttttcatataaggctagacagaagaattctcagtaacttccttgtgttgtgtgctttcaactcacagagttcaacgatcctttacacagagcagattagaaacactctttttgtggaatttgcaagtggagatttcagccactttgaggtcaatggtagaaaaggaaatatcttcgtataaaaactagacagattgattctcagaaaatcttttgtgatgtgtgcgttcaactcacagagtttaacttttcttctcatagagcagttaggaaacactctgtttgtaaagtctgcaagtggatattcagacctctttgaggccttcgttggaaacgggatttcttcatattatgctagacagaagaattctcagtaactttccttgtgttgtgtgtattcaactcacagagtagaacgatcctttacacagagcagacttgaaacactctttttgtggaatttgcaagtggagatttcaagcgctttgaggccaaaggcagaaaaggaaatatcttcgtataaaaactagacagaatgattctcagaaactcctttgtgatgtgtgcgttcaactcacagagttgaagttttcttttcttagagcagttaggaaacactctgtttgtaaagtctgcaagtggatattcagaactctttgaggccttcgttggaaacggggtttcttcatattctgctagacagaagaattctcagtaacttccttgtgttgtgtgtattcaactcacagagttgaacgatcctttacacagagcagacttgaaacattctttttgtggaatttgcaactggagatttcagccgctttgaggtcaacggtagaataggaaatatcttcctatagaaactagacacaatgattctgagaaactcctttgtgatgtgtgcgttcaactcacagagtttaacctttcttttcatagagcagttaggaaacactctgtttgtaaagtctgcaagtggatattcagacctccttgaggccttcgttggaaacgggatttcttcatattatgctagacacaataattctcaagtaacttccttgtgttgtgtgtattcaactcacagagttgaacgatcctttacagagagcagacttgaaacactctttttgttgaatttgcaagtggagatttcagccgctttgaggtcaatggtagaaaaggaaactatcttcgtataaagactagacagaatgattgtcagaaactcctttgtgatgtgtgcgttcaattcacagagtttaacctttcttttcatagagcagttaggaaacactctgtttgtaacgtctgcaagtggatattcagacatctttgaggctttcgttggaaacgggatttcttcatattctgctatacagaagaattcccagtaacttccttttgttgtgtgtgttcaagtcacagagatgaactctcatttacacagagcagatttgaaactctctttttgtggaatttgcaaatggagatttcaagcgctttgaggccaaaggcagaaaaggaaatatcttcctataaaaactagacagaatcattctcagaaacagctctgtgatgtgtgcgttcaactctcagagtttaacttttcttttcattcagcagtttggaaacactctgtttgtaaagtctgcacgtggatattttgaccacttagaggccttcgttggaaacgggttttttttcacgtaaggctagacggtagcattcccagtaacttccttgtgttgtgtgcattcaactcacagagatgaacgttcccttagacagagcagatttgaaacgctctatttgtgcaatttgcaagtgtagatttcaagcgctttaaggtcaatggcaaaaaaggaaatatcttcgtttcaaaactagacagaatcattcccacaaactgcgttgtgatgtgttcgttcaactcacagagtttaacctttctgttcatagagcagtgaggaaacactctgtttgtaaactctgtaagtggatattctgacatcttgtggccttcgttggaaaagggatttcttcatattctgctagactgaagaattctcagtaacttccttgtgttgtgtgtattcaactcacagaattgaacgatcctttacacagagcagacttgaaacactctttttgtggaatttgcaagtggagatttcagccgctttgaggtcaatggtagaaaaggaaatatcttcgtatggaaacaagacagaatgattctcagaaactcctttgtgatgtgtgcgttcaactcacagagtttaacctttcttttcatagagcagttgggaaacactctgtttgtaaagtctgcaagtggatattccgacatccttgaggctttcgttggaaatgggatttcttcatattctgctagaaagaagaattctcagtaacttccttgtgttgtgtgtattcaaaggacagagttgaactttcatttagagagagcagatttgaaacactgtttttgtggaatttgcaattggagatttcaagcgctttggggccaaaggcagaaaaggaaatatcttcgtataaaaactagacagaatcattctaagaaactgctgcgtgatgtgtgcgttcaactctcagagtttaacttttcttttcattcagcggtttggaaacactctgtttgtaaagtctgcacgtggatattttgaccacttagaggccttcgttggaaacgggtttttttcatgtaaggctagacagaagaattcccagtaacttccttgtgttgtgtacattcaacacacagagttgaacgttcccttagacagagcagatttgaaacactctttttgtgcaattggcaagtggagatttcaagcgctttaaggtcaatggcagaaaaggaaatatcttcgtttcaaaactagacagaatgattctcagaaactcctttgtgatgtgtgcgttcaactcacagagtttaacctttcttttcatagagcagttaggaaacactctgtttgtaaagtctgcaagtggatattctgacctctttgaggccttcgttggaaacgggatttcttcatattctgctagacagaagaattctcagtaacttccttgtgttgtgtactttcaactcacagagttgaacgttcctttacacagagcagattagaaacactctttttgtggaatttgcaagtggagatttcagccgctttgaggtcaatggtagaaaaggaaatatcttcataaaaaaactagacagaatgattctcagaaactcctttgtgatgtgtgcgttcaactcacagagtttaacctttcttttcatagagcagttaggaaacactccgtttgtaaagtctgcaagtggatattcagacctccttgaggccttcgttggaaacgggatttcttcatattatgctagacagaagaattctcagtaacttccttgtgttgtgtgtattcaactcacagagttgaacgatcctttgcacagagcagacttgaaacactctttttgtggaatttgaaagtggagatttcagccgctttgaggtcaatggtagaataggaaatatcttcctatagaaactagacagaatgattctcagaaactcctttgtgatgtgttcgttcaactcacagagttcaacttttcttttcatagagcagttgggaaacactctgtttgtacagtctacaagtggatattcagacctctttgaggccttcgttggaaacgggatttcttcatattctgcaagacagaagaattctcagtaacttccttgtgttgtgtgtattcaactcacagagttgaacgatcctttacacagagtagacttgaaacactccttttgtggaatttgcaagtggagatttcagccgctttgaagacaatggtagaataggaaatatcttcctatagaaactagacagaatgattctcagaaactcctttgtgatgtgtgcgttcaactcacagagtttaacttttgttttcatagagcagttaggaaacactctgtttgtaaagtcttcaagtggatatacagacctctttgaggccttcgttggaaacgggatttcttcatattctgctagacagaataattctcagtaacttccttgtgttgtgtgtattcaacccacagagttgaacgatcctttacagagagcagacttgaaacactctttttgtggaatttgcaagtggagatttcagccgctttgggtcaatggtagaataggaaatatcttcctatagaaactagacagaatgattctcagaaactcctttgtgatgtgtgtgttcaactcacagagtttaacctttcttttcatagagcagttagtaaacactctgtttataaagtctgcaagtggatattcagacccctttcaggccttcgttggaaacgggatttcttcatattctgctagacagaagaattcccagtaacttcccttgtgttgtgtgcattcaactcacagagttgaacgttcccttagacagagcagatttgaaacactctatttgtgcaatttgcaaatgtagatttcaagcgctttaaggtcaatggcagaaaaggaaatatcttcgtttcaaaactagacagaatcattcccacaaactgcgttgtgatgtgttcgttcaactcacagagtttaacctttctgttcatagagcagctaggaaacactctgtttgtaaagtctgtaagtggatattctgacatcttgtggccttcgttggaaacgggatttcttcatattctgctagacagaagaattctcagaatcttccttgtgttgtgtctattcaactcacagagttgaacgatcctttacacagagcagacttgaaacactctttttgtggaatttgcaagtggagatttcagccgctttgaggtccatggtagaaaaggaaatatcttcgtataaaaactagacagattgattctcagaaactcctttgtgatgtgtgcgttcaactcacagagtttaacctttcttttcatagagcagttaggaaacactctgtttgtaaagtctgcaagtggatattcagacctctttgaggccttcgttggaaacgggatttcttcatattctgctagacagaagaattctcagtaacttccttgtgttgtgtgtattcaactcacagagttgaacgatcctttacacagagcagacttgtaacactctttttgtggaatttgcaagtggagatttcagccgctttgaagtcaaaagtagaaaaggaaatatcttcctataaaaactagacagagtgattctcagaaactccttcgtgatgtctgcgttcaactcacagagtttaacctttcttttcatagagcagttaggaaacactctgtttgtaaagtctgcaagtggatattcagacctccttgaggccttcgttggaaacgggatttctacatattatgctagacagaagaattctcagtaacttccttgtgttgtgtgtattcaactgacagagttgaactttcatttagagagaggagatttgaaacactgtttttgtggaatttgcaagtggagatttcaagcgctttggggccaaaggcagaaaaggaaatatcttcgtataaaaactagacagaatcattctcagtaactgctctgtgatgtgtgcgttcaactctcagagtttaacttttcttttcattcaccagtttggaaacactcagtttgtaaagtctgcacgtggatattttgaccacttaggggtcttcgttggaaacgggtttttttcatgtaaggctagacagaagaattcccagtaacttccttgtgttgtgtgcattcaactcacagagttgaacgttcccttaggcagagcagatttgaaacactctatttgtgcaatttgcaagtgtagatttcaagcgctttaaggtcaacggcagaaaaggaaatatcttcgtctcaaaactagacagaatcattcccacaaactgcgttgtgatgtgttcgttcaactcacagagtttaacctttctgttcatagagcagttaggaaacactctgtttgtaaagtctgtaagtggatattctgacatcttgtggccttcgttggaaacgggatttcttcatagtctgctagacagaagaattctcagtaacttccttgtgttgtgtgtattcaactcacagagttgaacgatcctttacacagagcagacttgaaacactctttttgtggaatttgcaagtggagttttcagccgctttgaggtcaatggtagaataggaaatatcttcctatagaaactagacagaatgattctcagaaactcctttgtgatgtgtgcgttcaactcacagagtttaacttttcttttcatagagccgttaggaaacactctgtttgtaaagtctgcaagtggatattcagacctctttgaggccttctttggaaaagggatttcttcatattatgctagacagaagaattctcagcaacttccttgtgttgtgtgtattcaactcacagagttgaacgatcctttacacagagcagacttgtaacactctttttgtggaatttgcaagtggagatttcagccgctttgacgtcaaaggtagaaaaggaaatatcttcctataaaaactagacagaatgattctcagaaactcctttgtgatgtgtgcgttcaactcacagagtttaacctttcttttcatagagcagttagggaacactctgtttgtaaagtctgcaagtggatattcagacctctttgaggcctacgtaggaaacgggatttcttcatattatgctagacagaagaattctcagaaacttccttgtgttgtgtgtattcaactcacagagttgaacgatcctttacacagagcagacttgaaacactctttttctggaatttgcaagtggagatttcagccgctttgaggtcaatggtagaataggaaatatcttcctatagatactagacagaatgtttctcataaactcctttgtgatgtgtgcattcaactcaaagactttaacctttcttttcatagagcagttaggaaacactctgtttgtaaagtctgcaagtggatattcagacctccttgaggccttcgttggaaacgggatttcttcatattctgctagacagaagaattctcagtaacttccttgtgttgtgtgtattcaactcacagagttgaacgatcctttacacagagcagacttgaaacactctttttgtggaatttgcaagtggagatttcagccgctttgaggtcaatggtagaataggacatatcttcctatagaaactagacagaatgattctcagaaactcctttgtgatgtgtgcgttcaactcacagagtttaaccttactgttcatagagcagttaggaaacactctgtttgtaaagtctgcaagtggatattcagacctccttgaggccttcgttggaaacgggatttcttcatattctgctagacagaagaactctcagaatcttccttgtgttgtgtgtattcaacgcacagagttgaacgatcctttacacagagcagacttgaaacactctttttgtggaatttgcaagtggagatttcagccgctttgaggtccatggtagaaaaggaaatatcttcgtataaaaactagacagaatgattctcagaaacttcattgtgatgtgtgcgttcaactcacagagtttaacctttcttttcatagagcagttaggaaacactctgtttgtaaagtctgcaagtggatattcagacatccttgaggctttcgttggaaacgggatttcttcatattctgctagaaagaagaattctcagtaacttccttgtgttgtgtgtattcaactcacagagttgaacgatcctttacacagagcagacttgaaacactgtttttgtggaatttgcaagtggagatttcagccgctttgaagtcaatggtagaataggaaatatcttcctatagaaactagacagaatgattctcagaaactcctttgtgatgtgtgcgttcaactcacagagtttaacctttcttttcatagagcagttaggaaacactctgtttgtaaagtctgcaagtggatattcagacctccttgaggccttcgttggaagcgggatttcttcatgttcaggtagacagaagaattctcagtaacttccttgtgttgtgtgtattcaactcacagagttgaacgatcctttacacagagcagacttcaaacactctttttgtggaatttgcaagtggagatttcagccgctttgaagtcaatggtagaataggaaatatcttcctatagaaactagacagaatgattctcagaaactcctttgtgatgtgtgcgttcaactcacagagtttaacctttcttttctcagagcagttaggaaacactctgtttgtaaagtctgcaagtggatattcagacatctttgaggctttcgttggaaacggggtttcttcatattctgctagacagaagaattctcagtaacttccttgtgttgtgtgtattcaactcacagagttgaacgatcctttacacagagcatacttgaaacactctttttgtggaatttgcaagtggagatttcagccgctttgaggtcaatggtagaataggaagtatctccctatagaaactagacagaatgattctcagaaactcctttgtgatgtgtgcgttcaactcacacagtttaacctttcttttcatagagctgttaggaaacactctgtttgtaaagtctgcaagtggatattcagacctccttgaggccttcgttggaaacgggatttcttcatattatgctagacagaagaattcccagtaacttccatgtgttgtgtgtgttcaactcacagagttgaaatttcatttacacagagcagatttgaaacactctttttgtggaatttgcaaatggagatttcaagcggtttgaggccaaaggcagaaaaggaaatatcttcgtataaaaactagacagaatcattctcagaaactgctctgtgatgtgtgcgttcaactctcagagtttaactttccttttcattcagcagtttggaaacactctgtttgaaaagtctgctgctggataatttgaccactgagaggccatcgttggaaacgggttttttccatgtaacgctagacagaagaattctcagtaacttccttgtgttgtgtgtattcaactcacagagttgaacgatcctttacacagagcagacttgaaacactctttttgtagaatttgcaagtggagatttcagccgctttgaggtcaatggtagaataggaaatatcttcctttagaaactagacagaatgattctcagaaactcctttgtgatgtgtgcgttcaactcacagagtttaacttttcttttcatagagcagttaggaaacactctgtttgtaaagtctgcaagtggatattcagacatctttgaggctttcgttggaaacgggatttcttcatattctgctatacagaagaattcccagtaactttccttgtgttgtgtgtgttcaacttacagagttgaactttcatttacacagagcagatttgaaacactctttttgtggaatttgcaagtggagatttcaagcgctttgaggccaaaggcagaaaaggaaatatcttcgtataaaaactagacagaatcattctcagaaactgctctgtgatgtgtgcgttcaactctcagagtttaacttttcttttcattcagcaatttggaaacactctgtttgtaaggtctgcacgtggataatttgaccacttagaggccttcgttggaaacgggtttttttcatgtaaggctagacagaagaattcccagtaacttccttgtgttgtgtacattcaactcacagagttgaacgttcccttagacagagcagatttgaaacactctttttgtgcaattggcaaatggagatttcaagcgctttaaggtcaatggcaggaaaggaaatatcttcgtttcaaaactagacagaatcattcccacaaactgcgttgtgatgtgttcgttcaactcacagagtttaaactttcttttcatagagcagttaggaaccagtctgtttgtaaattctgtaagtggatattctgacatcttgtgaccttcgttggaaacgggatttcttcatattctgctagacagaagaattctcagtaacttcattgtgttgtgtgtattcaactcacagagttcaacgatgctttacacagagtagacttgaaacactcttgttgtggaatttgcaagtggagatttcagccgctttgaggtcaatggtagaataggaaatatcttcctatagaaactagacagaatgattctcagaaactcctttgtgatgtgtgcgttcaactcacacagtttaacctttgttttcatagagcagttaggaaacactctgtttgtaaagtctgcaagtggatattcagacctccttgaggcattcgttggaaacgggatttctacatattatgctagacagaagaattctcagtaacttccttgtgttgtgtgtattccactcacagagttgaacgatcctttacacagagcaggcttgtaacactctttttgtggaattttcaagtggagatttcagccgctttgaagtcaaaggtagaaaaggaaatatcctcctataaaaactagacagaatgattctcagaaactcctttgtgatgtgtgcgttcaactcacagagtttaacctttctgttcatagagcagttaggaaacactctgtttgtaaagtctgcaagtggatattcagacctctttgaggccttcgttggaaacgggatttcttcatattatgctagaccgaagaattcccagtaacttccttgtgttgtgtctgttcaactcacagagttgaactttcatttacacagagcagatttgaaacactctttttctggaatttgcaagtggagatttcaagcgctttgaggccaaaggcagaaaaggaaatatcttcgtataaaaactagacagaatcattctcagaaactgctctgcgatgtgtgcgttcaactctcagagtttaacttttcttttcattcagcagtttggaaacactctgtttgtaaagtctgcacgtggatattttgaccacttagaggccttcgttggaaacgggtttttttcctgtaagcctagacagaagaattctcagtaacttccttgtgttgtgtgtattcaactcacacagttgaacgatcctttacacagagcagacttgtaacactctttttgtggaatttgcaagtggagatttcagccgctttgaagtcaaatgtagaaaaggaaatatcttcctataaaaactagacagaatgattctcagaaacttctttgtgatgtgtgcgttcaactcacagagtttaacctttcttttcatagagcagttaggaaacactctgtttgtaaactctgcaagtggatatacagacctctttgaggccttcgttggaatcgggatttcttcatactatgctagacagaatatttctcagtaacttctttgtgtcgtgtgtatgcaactcacagagttcaaccttccttcagacagagcagatttgaaacactctttttgtggaatttgcaagtcgagatttcaagcgctttgaggccaaaggcagaaaaggaaatactttcgtataaaaactagacagaatcattctcagacactgctgcatgatgtgtgcgttcaactctcagagtttaacttttcttttcattcagcggtttggaaacactctgtttgtaaagtctgcacgtggatattttgaccacttagaggccttcgttggaaacgggtttttttcatgtaaggctagacagaaagaattcccagtaacttccttgtgttgtgtgcattcaactcacagagttgaacgttcccttagacagagcagatttgaaacactctatttgtgcaatttgcaagtgtagttttcaagctctttaaggtcaacggcagaaaaggaaatatcttcgtttcaaaactagacagaatcattcccacaaactgcgttgtgatgtgttcgttcatctcacagagtttaacttttctgttcatagagcagttaggaaacaccctgtttgtaaagtctgcaagtggatattcagacctccttgaggccttcgctggaaacgggatttcttcatattctgctagacagaagaattctcagtaaattccttgtgttgtgtgtattcaactcacagagttgaacgatcctttacacagagcagacttgaaacactctttttgtggaatttgcaagtggagatttcagccgctttgaggtcaatggtagaataggaaatatcttcctatagaaactagacacaatgattctcagaaactcctttgtgatgtgtgtgttcaactcacagagtttaacctttcttttcatagagcagttaggaaacactctgtttgtaatgtctgcaagtggatattcagacctctttgaggccttcgttggaaacgggttttttcatataaggctagacagaagaattctcagtaacttccttgtgttgtgtgtattcaactgacagagttgaactttcatttagagagagcagatttgaaacactgtttttgtggaatttgcaagtggagatttcaagtgctttggggccaaaggcagaaaaggaaatatcttcgtataaaaactagacagaatcattctcagaaactgctctgcgatgtgtgcgttcaactctcagagtttaacttttcttttcattcagcagtttggaaacactctgtttgtaaagtctgcacgtggatattttgaacatttagaggccttcgttggaaacgggtttttttcctgtaaggctagacagaataattctcagtaacttccttgtgttgtgtgtattcaactcacagagttgaacgatcctttacagagagcagacttgaaacactctttttgtggaatttgcaagtggagatttcagccgctatgaggtcaatggtagaaaaggaaatatcttcgtataaagactagacagaatgattctcctaaactccttcgtgatgtgtgcgttcaaatcacagagttgaacttttcttttcatagagcagttaggaaacactctgtttatatagtctgcaagtggatattcagacccctttgaggccttcgttggaaacgggatttcttaatattatgctagacagaagaattcccagtaacttccttgtgatgtgtgtgttcaactctgtgagttgaactttcatttacacagagcagatttgaaacactctttttgtggaatttgcaaatggagatttcaagcgctttgaggccaaaggcagaaaaggaaatatcttcgtataaaaactagacagaatgattctcagaaactcctttgtgatgtatgcgttcaactcacagagtttaacctttcttttcatagagcagttaggaaacactctgtttgtaaagtctgcaagtggatattcagacctccttgaggccttcgttgaaaacgggttttcttcatattatgctagacagaagaattctcagtaacttccttgtgttgtgtgtattcaactcacagagttcaatgatcctttacacagagcagacttgaaacactctttttgtggaatttgcaattggggatttcagccgctttgaggtcaatggtagaaaaggaaatatcttcgtataaaaactagacagaatgattctcagaaactcctttgtgatgtgtgcgttcaactcacagaatttaaccttccttttcatagagcagttgggaaacactctgtttgtaaagtctgcaagtggatattcagacctctttgaggccttcgttggaaacgggatttcttcatattctgctagacagaagaattctcagtaacttccttgtgttgtgtgtattcaactgacagagttgaactttcatttagacagagcagatttgaaacactctttttgtggaatttgcaagtggagatttcaagcgctttgaggccaaaggccgaaaaggaaatatcttcgtataaaaactagacagaatcattctcagaaactgctctgcgatgtgtgcgttcaactctcagagtttaacttttcttttcattcagcagtttggaaacactctgtttgtaaagtctgcacgtggatattttgaccacttagaggccttcgttggaaacgggttttttcctgtaaggctagacagaagaattctcagtaacttccttgtgttgtgtgtattcaactcacagagttgaacgatcctttacacagagcagacttgaaacactctttttgtggaatttgcaagtggagatttcagccgctttgaggtcaacggtagaataggaaatatcttcctaaagaaactagacagaatgattctcagaaactcctttgagctgtgtgcgttcaactcacagagtttaacctttcttttcatagagcagttaggaaacactctgtttgtaaagtctgcaagtggatattcagacatctttgaggctttcgttggaaacgggttttcttcatattctgctagacagaagaattctcagaaacttcctggtgttgtgtgttttcaactcacagagttcaacgatcctttacacagagtagacttgaaacactctttttgtggaattggcaagtggagatttcagccgctttgaggtcaagggtagaaaaggaaatatcttcgtacaaaaactagacagaatgattctcagcaaactcctttgtgatgtgtgcgttcaactcacagagttcaacctttcttttcatagagcagttgggaaacactctgtttgtaaagtctgcaagtggatattcagacttctttgaggccttcgttggaagcgggatttcttcatattctgctagacagaagaattcccagtaacttccttgtgttgtgtgtgttcaactcacagagttgaactttcatttacacagagcagattggaaacactctttttgtggaatttgcaagtggagatttcaagcgctttgaggccaaaggcagaaaaggaaatatcttcagtataaaaattagacagaatcattctcagaaaccgctctgtgatgtgtgcgttcaactctcagagtttaacttttcttttcattcagcagtttggaaacactctgtttgtaaagtctcctcgtggatattttgaccacttagaagccttcgttggaaacgtgttttttttcatgtaaggctagacagaagaattcccagtaacttccttttgttgtgtgcattcaactcacagagatgaacgttcccttagacagagcagatttgaaacactctatttgtgcaatttgcaagtgtagatttcaagcgctttaaggtcaatggcagaaaaggaaatatcttcgtttcaaaactagacagaattattcccacaaactgcgttgtgatgtgttcgttcaactcacagagttaaacctttcttttcatagagcagttaggaaacagtctgtttgaaaattctgtaagtggatattctgacatcttgtggccttcgttggaaacgggatttcttcatattctgctagacagaagaattctcagaatcttccctgtgttgtgtgtattcaactcacagagttgaacgatggtttacacagagcagatttgaaacactcatttggtggaatttgcaagtggagatttcagccgctttgaggtcaatggtagaaaaggaaatatcttcgtataacaactagacagaatgattctcagaaaatcttttgtgatgtgtgcgttcaactcacaaagtttaacttttcttctcatagagcagttaggaaacactctgtttgtaaagtctgcaagtgtatattcagacctactttgaggccttcgttggaaacgggatttcttcatattatgctagacagaagaattctcagtaacttccttgtgttgtgtgtattcaactcacagagttgaatgatcctttacacagagcagacctgaaacactctttttgtggaatttgcaagtggagatttcagctgctttgaggtcaatggtagaaaaggaaactatcttcgtataaagactagacagaatgattctcagaaactcctttgtgatgtgtgtgttcaactcacagagtttaacctttcttttcatagagcagttagtaaacactttgtttataaagtctgcaagtggatattcagacccctttgaggccttcgttggaaacgggatttcttcatattatgctagacagaagaattcccagtaacttccttgtgttgtgtgtgttcaactcacagagttgaactttcatttacacagagcagatttgaaacactctttttgtggaatttgcaaatggagatttcaagcgctttgaggccaaaggcagaaaaggaattatcttcgtataaaaactagacagaatcattctcagaaactgctgcgtgatgtgtgcattcaactctcagagtttaacttttcttttcattcagcggtttggaaacactctgtttgtaaagtctgcacgtggatattttgaccacttagaggccttcgttggaaacgggttttttttcatgtaaggctagacagaagaattcccagtaacttcctcgtgttgtgtgcattcaactcacagagttgaacgttcccttagacagagcagatttgaaacactctatttgtgcaattggcaagtgtagatttcaagcgctttaaggtcaatggcagaaaagggaatatcttcgtttcaaaactagacagaatcattcccacaaactgcgttgtgatgtgttcgttcaactcacagagcttaacctttcttttcatagagcacttaggaaacactctgtttgtaaattctgtaagtggatattctgaaatcttgtggccttcgttggaaacgggatttcttcatattctgctagacagaagaattctcagtaacttcccttgtgttgtgtgtattcaactcacagagttgaatgatcctttacacagagcagacttgaaacattctttttgtggaatttgcaagtggagatttcagccgctttgaggtcaatggtagaaaagtaaatatcttcgtataaagactagacagaatgattctcagaaactcctttgtgatgtgtgcgttcaactcacagagtttaacctttctgttcatagagctgttaggaaacactctgttcgtaaagtctgcaagtggatattcagacctccttgaggccttcgttggaaacgggatttcttcatattctgctagacagaagaattctcagtaacttccttgtgttgtgtttattcaactcacagagttgaatgatcctctacacagagcagacttgaaacactctttttgtggaatttgcaagtggagatttcagccgctttgaagtcaatggtagaaaagtaaatatcttcgtataaagactagacagaatgattctcagaaactcctttgtgatgtgtgagttcaactcacagagtttatcctttcttttcatagagcagttaggaagcactctgtttgtaaagtctgcaagtggatattcagacctctttcaggccttcgttggaaacgggatttcttcatattctgctagacagaagaattctcagtaacttccttgtgttgtgtgtattcaactcacagagttgaacgatcctttacacagagcagacttgaaacactctttctgtggaatttgcaagtggagatttcagccgctttgaggtcaatagtagaaaaggaaatatgcttcgtagaaaaactagacagaatgattctcagaaactcctttgtgatgtgtgcgttcaactcacagagtttaacctttcttttcatagagcagttgggaaacactctgtttgtaaagtctgcaagtggatattcagacatccttgaggcattcgttggaaacgggatttcttcatattctgctagaaagaagaattctcagtaacttccttgtgttgtgtgtattcaactcacagagttgaacgatcctttacacagagcagacttgaaacattctttttgtggaatttgcaagtggagatttcagccgctttggggtcaatggtagaataggaaatatcttcctatagaaactagacagaatgattctgagaaactcctttgtgatgtgtgcgttcaactcacagagtttaacctttcttttcatagagcagttgggaaacactccgtttgtaaactctgcaagtggatattcagacctcctttaggccttcgttggaaacgggatttcttcatattatgctagacagaagaattctcagtaacttccttgtgttgtgtgtattcaactgacagagttgaactttcatttagagagagcagatttgaaacactgtttttctggaatttgcaagtggagatttcaagcgctttggggccaaaggcagaaaaggaaatatcttcgtataaaaactagacagaatcattctcagaatctgctgcgtgatgtgtgcgttcaactctcagagtttaacttttcttttcattcagcggtttggaaacactctgtttgtaaagtctgcacgtggatattttgaccacttagaggccttcgttggaaacgggattttttcatgtaaggctagacagaagaattcccagtaacttccttgtgttgtgtgcattcaactcacagagttgaacgttcccttagacagagcagatttgaaacactctatttctgcaatttgcaagtgtagtttccaagctctttaaggtcaacggcagaaaaggaaatatcttcgtttcaaaactagacagaatcattcccacaaactgcgttgtgatgtgttcgttcaactcacagagtttaacctttctgttcatagagcagttaggaaacactctgtttgtaaagtctgtaagtggatattctgacatcttgtggccttcgttggaaacgggatttcttcatattctgctagatagaacaattctcagtaacttccttgtgttgtgtgtattcaacacacagagttgaacgatcctttacacagagcagacttgaaacactctttttgtggaatttgcaagtggagatttcagccgctttgaggtcaatggtagaataggaaatatcttcctatagaaactagacagaatgattctcagaaactcctttgtgatgtgtgcgttcatctcacagagtttaacctttcttttcatagagcagttgggaaacactctgtttgtaaagtctgcaagtggatattcagacatccttgaggctttcgttggaaacgggatttcttcatattctgctagaaagaataattctcagtaacttccttgtgttgtgtgtattcaactcacagagttgaaggatcctttacagagagcaggcttgaaacactctttttgtcgaatttgcaagtggagatttcagccgctttgaggtcaatggtagaataggtaatatcttcttatagaaactagacagaatgattctcatgaactcctttgtgatgtgtgcgttcaactcacagagtttaacctttcttttcatagagcagttaggaaacactctgtttgtaaagtctgcaagtggatattcagacctccttgaggccttcgttggaaacgggattacttcatattctgctagacagaagaattctcagtaacttccttgtgttgtgtgcattcaactcacagagttgaatgatcctttacacagagcagattagaaacactctttttgaggaatttgcaagtggagatttcagccgctttgaggtcaatggtagaaaaggaaatatcttcgtataaaaactagacagaatgattctcataaactcctttgtgatgtgcgcattcaactcacagagtttcacctttcttttcatagagcagttaggatacactctgtttgtaaagtctgcaagtggatattcagacctccttgaggccttcgttggaaacgggaattcttcatattctgctagacagaagaattctcagtaacttccctgtgttgtgtgtattcaactgacagagtcgaactttcatttagagagagcagatttgtaacactgtttttgtggaatttgcaagtggagatttcaagcgctttggggccaaaggtagaaaaggaaatatcttcgtataaaaactagacagaatcattctcagaaactgctctgcgatgtgtgcgttcaactctcagagtttaacttttcttttcattcagcagtttggaaacactctgtttgtaaagtctgcacgtggataacttgaccacttagaggacttcgttggaaacgggtttttttcctgtaaggctagacagaagaattcccagtaacttccttgtgttgtgtgcattcaactcactgagatgaacgttcccttagacagagcagatttgaaacactctatttgtgcaatttgcaagtgtagatttcaagcgctttaaggtcaatggcagaaaaggaaatatctttgtttcaaaactagacagaatcattcccacaaactgcgttgtgatgtgttcgttcaactcacagagtttaacctttctgttcatagagcagttaggaaacactctgtttgtaaagtctgtaagtggatattctgacatcttgtggccttcgttggaaacgggatttcttcatattctgcgagacagaataattctcagtaacttccttgtgttgtgtgtattcaactcacagagttgaacgatcctttacacagagcagacttgaaacactctttttgtggaatttgcaagtggagatttcagccgctttgaggtcaatggtagaataggaaatatcttcctatggaaactagacagaatgattctcagaaactcctttgtgatgtgtgtgttcaactcacagagtttaacctttcttttcatagaacagttagtaaacactctggttttaaagtctgcaagtggatattcagacccctttgaggccttcgttggaaacaggatttcttcatattctgctagacagaataattctcagtaacttccttgtgttgtgtgtattcaactaacagagttgaactttcatttggagagagcagatttgaaacactgtttttgtggaatttgcaagtggagatttcaagcgctttggggccaaaggcagaaaaggaaatatcttcgtataaaaactagacagaatcattctcagaaaatgctctgtgatgtgtgcgttgaactctcagagtttaacttttgttttcattcagcagtttggaaatactctgtttgtaaagtctgcacgtggatattttgaccacttagaggccttatttggaaacgggtttttttcatgtaagggtagacagaagaattcccagtaactttccttgtgttgtgtacattcaactcacagagttgaacgttcccttagacagagcagatttgaaacactctttttgtgcaattggcaagtggtgatttcagccgctttgaggtcaatggtagaaaaggaaatatcttcctataaaaactagacagaatcattcccacaaactgcgttgtgatgtgttcgttcaactcacagagtttaacctttcttttcatagagcagttaggaaacagtctgtttgtaaattctgtaagtggatattctgacatcttgtggccttcgttggaaacgggatttcttcatattctgctagagagaatacttctcagtaacttccttgtgttgtgtgtattcaactcacagagttgaaggatcctttacagagagcaggcttgaaacactctttttgtcgaatttgcaagtggagatttcagccgctttgtggtcaatggtagaataggaaatatcttcttatagaaactagacagaatgattctcagaaacttctttgtgatgtgtgcgttcaactcacagagtttaacctttcttttcatagagcagttaggaaacactctgtttgtaaactctgcaagtggatattcagacctgtttgaggccttcgttggaaacggtatttcttcatactatgctagacagaagaattctcagtaacttccttgtgttgtgtgtattcaactcacagagttgaacgatcctttacacagagcagacttgtaacactctttttgtggaatttgcaagtggagatttcagccgctttgaagtcaaaggtagaaaaggaaatatcttcctataaaaactagatagaatgattctgagaaactcctttgtgatgtctgcgttcaactcacagagttcaacctttcttttcatagagcagttaggaaacactctgtttgtaaagtctgcaagtggatattcagacttctttgaggctttcgttggaaacgggatttcttcatattctgctagacagaagaattcccagtaacttccttgtgttgtgtgtgttcaactcacagagttgaactttcattcacacagagcagatttgaaacactctttttgtggaatttgcaagtggagatttcaagcgctttgaggccaaaggcaaaaaaggaaatatcttcgtataaaaactagacagaatcattctcagaaactgctctgcgatgtgtgcgttcaactctcagagtttaacttttcttttcattcagcagtttggaaacactctgtttgtaaagtctgcacgtggatattttgaccacttaggggccttcgttggaaacgggtttctttcctgtaaggctagacagaagaattcccagtaacttccttgtgttgtgtacattcaactcacagagttgaacgttcccttagacagagcagatttgaaacactctttttgtgcaattggcaagtggagatttcaagcgctttgaggtcaatggcagaaaacgaaatatcttcgtttcaaaactagacagaatcattcccacaatctgcgttgtgatgtgttcgttcaactcacagagtttaacctttcttttcatagagcagttaggaaacagtctgtttgtcaattctgtaagtggatattctgacatcttgtggccttcgttggaaacgggatttcttcatattctgctagacagaagaattctcagaaacttccttgtgttgtgtgttttcaactcacagatttgaacgatgctttacacagagtagacttgaaacactctttttgtggaatttgcaagtggagatttcagccgctttgaggtcaatggtagaaaaggaaatatcttcgtttaaaaactagacagaatgattctcagaaactcatttgtgatgtgtgcgttcaactcacagagtttaacctttcttttcatagagcagttaggaaacactctgtttgtaatgtctgcaagtggatattcagacctctttgaggccttcgttggaaacgggatttcttcatattacgctagacagaaaaattctcagtaacttccttgtattctgtgtattcaactctcagagttgaatgatcctttacacagagcagacttgaaacactctttttgtggaatttgcaagtggagatttcagccgctttgtggtcaatggtagaataggaaatatcttcctatagaaactagacagaatgattctcagaaactcctttgtgatgtgtgcgttcaactcacagagtttaacctttctgttcatagagcagttaggaaacattccgtttgtaaagtctgcaagtggatattcagacctctttgaggccttcgttggaaacgggatttcttcatattatgctagacagaagaattctcagcaacttccttgtgttgtgtgtattcaactcacagagttgaacgatcctttacacagagcagacttgaaacactctttttgtggaatttgcaagtggagatttcagccgctttcaggtcaatagtagaaaaggaaatatcttcgtagaaaaactagacagaatcattctcagaaactccttcgtgatgtgtgccgttcaactcacagagtttaacctttcttttcatagagcagttaggaaacactctgtttataaagtctgcaagtggatattcagacctctttgaggccttcgttggaaacaggatttcttcatatgatgctagacagaagaattctcagtgacttccttgtgttgtgtgtattcaactcacagagttgaacgatcctttacacagagcagacttgaaacactctttttgtggaatttgcaagtggagatttcagccgctatgtggtcaatggtagaataggaaatatcttcctatagaaactagacagaatgattctcagaaactcctttgtgatgtgtgccttcaactcacagagtttaacctttcttttcatagagcagttaggaaacactctgtaaagtctgcaagtggatattcagacctctttgaggccttcgttggaaacgggatttcttcatattctgctagacagaagaattctcagtaacttccttgtgttgtgtgtattcaactcacagagttgaacgatcctttacacagagcagacttgaaacactctttttgtggaaattgcaagtggagatttcagccgctttgaggtcaatggtagaaaaggaaatatcttcgtataaaaactggagagaatgattctcagaaactcctttgtgatgtgtgcgttcaactcacagagtttaacctttcttttcgtagagcagttaggaaacactctgtttgtaaagtctgcaagtggatattcagacctccttgaggccttcgttggaaacgggatttcttcatattctgctctacagaagaattctcagtaacttccttgtgttgtgtgtattcaactcacagagttgaacgatcctttacacagtgcagacttgaaacactctttttgtggaatttgcaagtggagatttcagccgctgtgagttcaatggtagaataggaaatatcttcctatagaaactagacagaatgattctcagaaactcctttgagatgtgtgtgttcaactcacagagtttaacctttcttttcatagagcagttaggaatcactctgtttgtaaagtctgcaagtggatattgagacctctttgaggccttcgttggaaacgggattttttcatataaggctagacagaataattctcagtaacttccttgtgttgtgtgtattcaactcacagagttgaacgatcctttacacagagcagacttgaaacactctttgtgtggaatttgcaagtggagatttcagccgctttgaggtcaatggtagaataggaaatatcttcctatagaaactagacagaatgattctcagaaactcctttgtgatgtgtgcgttcaactcacagagtttaactttccttttcatagagcagttaggaaacactctgtttgtaatgtctgcaagtggatattcagacccctttgaggccttcgttggaaacgggatttcttcatattatgctagacagaataattctcagtaacttccttgttttgtgtgtattcaactcacagagttgaacgatcctttacagagagcagacttgaaacactctttttgtggaatttgcaagtggagatttcaggcgctttgaggtcaatggtagaataggaaatatcttcctatagaaactagacagaatgattctgagaaactcctttgtgatgtgtgcgttcaactcacacagtttaacctttcttatcatagagcagttaggaaacactctgtttgtaaagtctgcaagtggatattcagacctccttgaggccttcgttggaaacgggatttcttcatattatgctagacataagaattctcagtaactgccttgtgttgtgtgtattcaactcacagagttgaacgatcctttacacagggcagacttgaaacactctttttgtggaacttgcaagtggagatttcagccgctttgaggtcaatggtagaataggaaatatcttcctatagaaactagacagaatgattctcagaaactcctttgtgatgtgtgcgttcaactcgcagagttcaacctttcttttcatagagcagttgggaaacactctgtttgtaaagtctgcaagtggatattcagacatccttgaggctttcgttggaaacgggttttcttcatattctgctagaaagaagaattctcagtaacttccttgtgttgtgtgtattcaactcacagagttcaacgatcctttacacagagcagacttgaaacactctttttggggaatttgcaagtggagatttcagccgctttgaggtcaatggttgaaaaggagatatcttcgtataaaaactagacagaatgattctcagaaactcctttgtgatgtgtgcgttcaactcacagagtataacctttcttttcttagagcagttaggaaacactctgtttgtaaagtctgcaagtggatattcagacctccttgaggccttcgttggaaacgggtttttttcatataaggctagacagaagaattctcagtaacttccttgtgttgtgtgtattcaactcacagagttgaacgatcctttacacagagcagacttgaaactctctttttgtggaatttgcaagtggagatttcagccgctttgagttcaatgttagaataggaaatatcttcctatagaaactagacagaatgattctcaaaaactcctttgtgatgtgtgcgttcaactcacagagttcaacctttcttttcctagagcagttgggaaacactctgtttgtaaagtctgcaagtggatattcagacttctttgaggccttcgttggaagcgggatttcttcatattctgctagacagaagaattctcagtaacttccttgtgttgtgtgtattcaactgacagagttgaactttcatttggagagagcagatttgaaacactgtttttgtggaatttgcaagtggagatttcaagcgctttggggccaaaggcagaaaaggatatatcttcgtagaaaaactagacagaatcattctcagaaactgctctgcaatgtgtgcgttcaactctcagagtttaactttgcttttcattcagcagtttggaaacactctgtttgtaaagtctgcacgtggatattttgaccacttagaggccttcgttggaaacgggtttctttcctgtaaggctagacagaagaattcccagtaacttccttgtgttgtgtgcattcaactcacagagttgaacgttgccttagacagagcagatttgaaacactctatttgtgcaatttgcaagtgtagatttcaagcgctttaaggtcaatggcagaaaaggaaatatcttcgtttcaaaactagacagaatgattctcagaaacttcattgtgatgtgtgcgttcaactcacagagttaaacctttcttttcatagagcagttgggaaacagtctgtttgtaaattctgtaagtggatattctgacatcttgtggccttcgttggaaacaggatttcttcatattctgctagacagaagaattctcagaaacttccttgtgttgtgtgtattcaactcacagagttgaacgatcgtttacacagagcagacttgagacactctttttgtggaatttgtaagtggagatttcagccgctttgaggtcattggtagaaaaggaaatatcttcatataaaaactagacagaatgattctcataaactcctttgtgatgtgtgcgttcaactcacagcagtttaacttttcttttcatagagcagttaggaaaaactctgtttgtaaagtctgcaagtggatattcagacctctttgaggccttcgttggaaacgggatttcttcatattatgctagacagaagaattctcagtaacttccttgtgttgtgtgtattcaactcacagagttgaacgatcctttacacagagcagacttgaaacactctttttgtggaatttgcaagtggagatttcagccgctttgagttcaattgtagaataggaaatatcttcctatagaaactagacagaatgattctcagaaactcctttgtgatgtgtgcgttcaactcacagagtttaacctttcttttcatagagcagttaggaaacactctgtttgtaaagtctgcaagtggatattcagtcttctttgaggctttcgttggaaacgggatttcttcatattctgctatacagaagaattctcagtaacttccttgtgttgtgtgcattcaactcagagagttgaacgatcttttacacagagcagattggacacactcttgttgtggaattgcaagtggagatttcagcccctttgaggtcaatggtagaaaaggaaatatctttgtataaaaacaagacagaatgattctcagaaactcctttgtgatgtgtgcgttcaagtcacagagtttaacctttcttttcatagagcagttaggaaacactctgtttctaaagtctgcaagtggatattcagacctctttgaggccttcgttggaaacgggatttcttcatattctgctagacagaagaattctcagtaacttccttgtgttgtgtgtattcaactcacagagttgaacgatcctttatacagagcagacttgtaacactctttttgtggaatttgcaagtggagatttcagccgctttgaagtcaaaggtagaaaaggaaatatcttcctataaaaactagacagaatgattctcagaaaatcttttgtgatgtgtgcgtttaactcacagagtttaacttttcttctcatagagcagttaggaaacactctgtttgtaaagtctgcaagtggatattcagacctctttgaggccttcgttggaaacgggatttcttcatattatgctagacagaagaattctcagtaacttccttgtgttgtgtgtattcaactgacagagttgaactttcatttagacagagcagatttgaaacactcttcttgtggaatttgcaaatggagatttcaagcgctttgaggccaaaagcagaaaaggaaatatcttcgtataaaaactagacagaatcattctcagaaactgctctgcgatgtgtgcgttcaactctcagagtttaacttttcttttcattcagcagtttggaaacactctgtttgtaaagtctgcacgtgtttattttgaccacttagaggccttcgttggaaacgggtttttttcctgtaaggctagacagaagaattcccagtaacttccttgtgttgtgtgcattcaactcacagaggtgaacgttcccttagacagagcagatttgaaacactctatttgtgcaatttgcaagtgtagatttcaagcgctttaaggtcaatggcagaaaaggaaatatcttcgtttcaaaactagacagaatcattcccacaaactgcgttgggatgtgctcgttcaactcacagagtttaaactttctgttcatagagcagttaggaaacactctgtttgtaaagtctgtaagtggatattctgacatcttgtggcctttgttggaaacgggatttcttcatattctgctagacagaagaattctcagtaacttccttgtgttgtgtgttttcaactcacagagttgcacgatcctttacacagagcagacttgaaacactccttttgtggaatttgcaagtggagatttcagccgctttgaggtcaatggtagaataggaaatatcttcctatagaaagtagacagaatgattctcagaaactcctttgtgatgtgtgcgttcaactcacagagtttaacttttcttttcatagagcagttaggaaacactctgtttgtaaagtctgcaagtggatattcagacctctttgaggccttcgttggaaacgggatttcttcatattatgctagaccgaagaattgccagtaacttccttgtgttgtgtgtgttcaactcacagagttgaactttcatttacacagagcagatttgaaacactctttttgtggaatttgcaaatggagatttcaagcactttgaggccaaaggcagaaaaggaaatgtcttcgtttcaaaactagacagaatcattcccagaaactgctctgcgatgtgtgcgttcaactctcagagtttaacttttcttttcattcagcagtttggaaacactctgtttgtaaagtctgcacgtggataatttgaccacttagaggccttcgttggaaacgggtttttttcatgtaaggctagacagaagaattctcagtaacttccttctgttgtgtgtattcaactcacagagttgaacgatcctttacacagagcagacttgtaacactctttttgtggaatttgcaagtggagatttcagccgctttgaagtcaaaggtagaaaaggaaatatcttcctataaaaactagacagaatgattctcagaaactcctttgtgatgtgtgctttcaactcacagagtttaacgtttcttttcatagagcagttaggaaacactctgtttgtaaagtctccaagtggatattcagacctctttgaggccttcgttggaaacgggtttttttcatataaggctagacagaagaattctcagtaacttccttgtgttgcgtgtattcaactgacagagttgaactctcatttagatagagcagattttaaacactgtttttgtggaatttgcaagtgtatatttcaaccgctttggggccaaatgcagaaaaggaaatatcttcgtataaaaactagacagaatgattctcagaaactcctttgtgatgtgtgcgttcaactcacagagtttatcctttcttttcatagagcagttaggaaacactctgtttgtaaagtctgcaagtggatattcagacatctttgaggctttcgttggaaacgggatttcttcatattctgctagacagaagaattctcagaaacttcgttgtgttgtgtgtggtcaactcacagagttcaacgatcctttacacagagtagacttgaaacactctttttgtggaattggcagggtggagatttcagccgctttgaggtcaattttagaaaaggaaatatcttcgtataaaaactagacagaatgattctcagaaactcctttttgctgtgtgcgttcagctcacagagtttaacctttcttttcatagagcagttaggaaacactctgtttgtaaagtctgcaagtggatattcagacctccttgaggccttcgttggaaacgggatttcttcatattctgctatagagaagaattcccagtaacttccttgtgttgtgtgtgttcaactcacagagttgaactttcatttacacagagcagatttgaaacactctttttgtggaatttgcaagtggagatttcaagcactttgaggccaaaggcagaaaaggaaatatcttcgtttcaaaactagacagaatcattctcagaaactgctctgcgatgtgtgctttcaactctcagagtttaacttttcttttcattcagcagtttgaaaacactctgtttgtaaagtctgcacgtggataacttgaccacttagaggccttcgttggaaacgggtttttttcatgtaaggctagacagaagaattcccagtaacttccttgtgttgtgtacattcaactcacagagttgaacgttcccttagacagagcagatttgaaacactctttttgtgcaattggcaagtggagatttcaagcgctttaaggtcaatggcagaaacggaaatatcttcgtttcaaaactagacagaatcattcccacaaactgcgttgtgatgtgttcgttcaactcacagagtttaacctttcttttcatagaacagttaggaaacagtctgtttgtaaattctgtaagtggatattctgacatcttgtggccttcgttggaaacgggatttcttcatattctgctagacagaagaattctcagtaacttccttgtgttgtgtgtattcaactcacagagttgaacgatcgtttacacagagcagacttgagacactctttttgtggaatttgtaagtggagatttcagccgctttgaggtcaacggtagaaaaggaaatatcttcatataaaaactagacagaatgattctcagaaacttctttgtgatgtgtgcgttcaactcacagagtttaacctttcttttcatagagcagttaggaaacactctgtttgtaaactctgcaagtggatattcagacctgtttgaggccttcgttggaaacgggatttcttcatattatgctagacagaagaattatcagaaacttccttgtgttgtgtgtattcaactcaaagagttgaacgatcctttacacagtgcagacttgaaacactctttttgtggaatttgcaagtggagatttcagccgctttgaggtcaatggtagaataggaaatatcttcctataggaactagacagaacgattctcagaaactcctttgtgatgtgtgcgttcaactcacagagtttaacctttcttttcatagagcagttaggaaacactctgtttgtaaagtctgcaagtggatattcagacctgtttgaggccttcgttggaaacgggatttcttcatattctgctagacagaagaattcccagtaacttccttgtgttgtgtgtgttcaactcacagagttgaactttcatttacaaagagcagatttgaaacactctttttgtggaatttgcaggtggagatttcaagcgctttgaggccaaaggcagaaaaggaaatatcttcgtataaaaactagacagaatcattctcagaaactgctctgcgatgtgtgcgttcaactctcagagtttaacttttcgtttcattcagcagtttggaaacactctgtttgtaaagtctgcacgtggatattttgaccacttagaggccttcgttggaaacgggtttttttcatgtaaggctagacagaagaattctcagtaacttccttgtgttgtgtgtattcaactcacagatttgaacgatcctttacacagagcagacttaaaacactctttttgtggaatttgcaagtggagatttcagccgctttgaggtcaatgttagaaaaggaaactatcttcgtataaaaactagacagaatgattctcataaactcctttgtgatgtgtgcgttcaactcacagagtttaacttttcttttcatagagcagttaggaaacactctgtttgtaaagtctgcaagtggatattcagacctgtttgaggccttcgttggaaacgggatttcttcatattctgctagacagaagatttcccagtaacttccttgtgttgtgtgtgttcaactcacagagttgaactttcatttacacagagcagatttgaatcactctttttgtggaatttgcaaatggagatttcaagcgctttgaggccaaaggcagaaaaggaaatatcttcgtataaaaactagacagaatcattctcagaaaccgctctgtgatgtgtgcgttcaactctcagagtttaacttttcttttcattcagcagtttggaaacactctgtttgtaaagtctgcacgtggatattttgaccacttagaagccttcgttggagacaggtttttttcatgtaaggctagacagaagaattctcagtaacttccttgtgttgtgtgtattaaactcacagagttgaacgatcctttacacagagcagacttgaaacactctttttgtggaatttgcaagtggagatttcagccgctttgaggtcaatggtagaataggaaatatcttcctatagaaaatagacacaatgattctcagaaactcctttgtgatgtgtgcgttcaactcacacagtttaacctttcttttcatagagcagttaggaaacactctgtttgtaaagtctgcaagtggatattcagacctccttgtggccttcgttggaaacgggatttcttcctattatgctagacagaagaattctcagtaacttccttgtgttgtgtgtattcaactcacagagttgaacgatcctttacacagagcagacttgaaacactctttttgtggaatttgcatgtggagatttcagccgctttgagttcaatggtagaataggaaatatcttcttatagaaactagacagaatgattctcagaaactgctttgtgatgtgtgtgttcaacacacaaggtttaacctttcttttcatagagcagttaggaaacactctgtttgtaaagtctgcaactggatattcagacatccttgaggctttcgttggaaacgggatttcttcatattctgctagaaagaagaattctcagtaacttccttgtgttgtgtgtattcaactcacagagttgaacgatcctttacacagagcagacttgaaacactctttttgtggatatttgcaagtggagatttcagccgctttgaggtcaatgttagaaaaggaaatatcttcgtataaaaactagacagaatgattctgagaaactcctttgtgatgtgtgcgttcaactcacagagtttaacctttcttttcatagagcagttaggaaacactctgtttgtaaagtctgcaagtggatattcagacctccttgaggccttcgttggaaactgcatttcttcatattctgctatacagaagaattctcagtaacttccttgtgttgtgtgtattcaactcacagatttgaacgatcctttacacagagcagacttgaaacactctttttgtggaatttgcaagtggagatttcagcctctttgtggtcaatggtagaataggaaatatattcctatagaaactagacagaatcattctcagaaactgctgcgtgatgtgtgcgttcaactctcagagtttaacttttcttttcattcagcggtttggaaacactctgtttgtaaagtctgcacgtggaacttttgaccacttagaggccttcgttggaaacgggtttttttcatgtaaggctagacagaagaattcccagtaacttccttgtgttgtgtgcattcaactcacagagttgaacgttcccttagacagagcagatttgaaacactctatttgtgcaatttgcaagtgtagttttcaagctcttttaggtcaacggcagaaaaggaaatatcttggtttcaaaactagacagaatcattcccacaaactgcgttgtgatgtgttcgttcaactcacagagtttaacctttctgttcatagagcagttaggaaacactctgtttgtaaagtctgtaagtggatattctgacatcttgtggccttcgttgggaacgggatttcttcatattctgctagacagaagaattctcagtaacttccttgtgttgtgtgtattcaactcacagagttgaacgatcctttacacagagcagacttgaaacattctttttgtggaatttgcaagtggagatttcagccgctttgaggtcaatggtggaataagaaatatcttcctatagaaactagacagaatgattctcagaaactcctttgtgatgtgtgcgttcaactcacagagtttaacctttgttttcatagagcagttaggaaacactctgtttgtaaagtctgcaggtggatattcagacatctttgaggctttcgttggaaacgggatttcttcatattctgctatacagaagaattcccagtaacttctttgtgttgtgtgtgttcaactcacagagatgaactctcatttacacagagcagatttgaaactctctttttgtggaatttgcaaatggagatttcaagcgctttgaggccaaaggcagaaaaggaaatatcttcgtataaaaactaggcagaatcattctcagaaactgctctgcgatgtgtgcgttcaactctcagagtttaacttttcttttcattcagcagtttggaaacactctgtttgtaaagtctgcacttggataatttgaccacttagaggcctttgttggaaacgggtttttttcatgtaaggctagacagaagaattctcagaaacttcgttgtgttgtgtgttttcaactcacagagttgaacgatcctttacacagcgtagacttgaaacactctttttgtggaatttgcaagtggagatttcatccgctttgaggtcaatggtagaaaaggaaatatcttcgtataaaaactagacagaatgattctcagaaactcctttgtgatgtgtgcgttgaactcacagagtttaacctttcttttcatagagcagttaggaaacactctgtttgtaaagtctgcaagtggatattcagacctctttgaggccttcgttggaaacggttttttttcatataaggctagacagaagaattctcagtaacttccttgtgttttgtgtattcaactgacagagttgaactttcatttagagagagcagatttgaaacactgtttttgtggaatttgcaattggagatttcaagcgctttggggccaaaggcagaaaaggaaatatcttcgtataaaaactagacagaatcattctcagaaactgctctgcgatgtgtgcgttcaactctcagagtttaacttttcttttcattcagcagtttggaaacactctgtaaagtctgcacgtggatattttgaccatttagaggctttcgttggaaacgggtttttttttgtaaggctagacagaagaattcccaggaacttccttgtgttgcgtacattcaactcacacatttgaacgttcccttagacagagtagatttgaaatactctttttctgcaattggcaagtggtgatttcagccgctttgaggtcaatggtagaaaaggaaatatcttcgtataaaaactagacagaatcattcccacaaactgcgttgtgatgtgttcgttcaactcacagagtttaacctttctgttcatagagcagttaggaaacactctgtttgtaaagtctgaaagtggatattctgacatcttgtggccttcgatggaaacgggatttcttcatattctgctagacagaagaattctcagaaacttccttgtgttgtgtgtattcaactcacagagatgaacgatcctttacacagagcagacttgaaacactctttttgtggaatttgcaagtggagatttcagccgctttgaggtccatggtagaaaaggaaatatcttcgtataaaaactagacagaatgattctcagaaactcctttgtgatgtgtgcgttcaactcacagagttcaacctttcttttcatagagcagttaggagacactctgtttgtaaagtctgcaagtggatattcagacctctttgaggccttcgttggaaacgggttttcttcatattctgctagagagaagaattcccagtaacttccttgtgttgtgtacattcaactcacagagttgaacgttcccttagacagagcagacttgtaacactctttttgtggaatttgcaagtggagatttcagcagctttgaagtcaaaggtagaaaaggaaatatcttcctataaaaacttgacagaatgattctcagaaactcctttgtgatgtgtgcgttcaactcacagagtttaacctttcttttcatagagcagttaggaaacactctatttgtaaattctgcaagtggatattcagacctccttaaggccttcgttggaaacgggatttcttcatattatgctagacagaagaattcccagtaacttccttgtgttgtgtgtgttcaactcacagagttgaactttcatttacacagagcagatttgaaacactctttttgtggaatttgaaatggagatttcaagcgctttgaggccaaaggcagaaaaggaaatatcttcgtataaaaacgagacagaatcattctcagaaactgctctgcgatgtgtgcgttcaactctcagagtttaacttttcttttcattcagaagtttggaaacactctgtttgtaaagtctgcacgtggataacttgaccacttagaggccttcgttggaaacgggtttttttcatgtaagtctagacagaagaattcccagtaacttccttgtgttgtgtacattcaactcacagagttgaacgttcccttagacaaagcagatttgaaacactctttttgtgcaattggcaaatggagatttcaagcgctttaaggtcaatggcagaaaaggaaatatcttcgtttcaaaactagacagaatcattcccacaaactgcgttgtgatgtgttcattcaactcacagagtttaacctttccgttcatagagcagttaggaaacacactgtttgtaaagtctgtaagtggatattctgacatcttgtggccttcgttggaaacgggatttcttcatattctgctagacagaagaattctgagaatcttccttgtgttgtgtgtattcaactcacagagttgaacgatcctttacacagagcagacttgaaacactctttttgtggaatttgcaagtggagatttcagccgctttgaggtccatggtagaaaaggaaatatcttcgtataaaaactagacagaatgattctcagaaaatcctttgtgatgtgtgcgttcaactcacagagtttaacttttctgttcatagagcagttaggaaacactctgtttgtaaagtctgcaagtggatattcagacctctttgaggccttcgttggaaacgttatttcttcatattatgctagacagaagaattctcagtaacttcccttgtgttgtgtgtattcaactcacagagttgaacggtcctttacacagagcagacttgaaacactctttttgttgaatttgcaagtggagatttcagccgctttgaggtcaatggtagaataggaaatatcttcctatagaaactagacagaatgattctcagaaactcctttgtgatgtgtgtgttcaactcacagagtttaacctttcttttcatagaacagttagggaacactctgtttgtaaagtctgcaagtggatattcagacctctttgaggccttcgttggaaacacgtttttttaatctaaggctagacagaagaattcccagtaacttccttgtgttgtgtgtgttcaactcacagagttgaactttcatttacacagagcagatttgaaacactctttttgtggaatttgcagatggagatttcaagcgctttgaggccaaaggcagaaaaggaaatatcttcgtataaaaactagacagaatcattctcagaaactgctctgtgatgtgtgcgttcaactctcagagtttaacttttcttttcattcagcagtttggaaacactctgtttgtaaagtctgcacgtggataatttgaccacttagaggccttcgttggaaacgggtttttttcatgtaaggctagacagaataattctcagtaacttccttttgttgtgggtattcaactcagagttgtacgatcctttacagagagcagacttgaaacactctttttgtggaatttgcaagtggagatttcagccgctttgaggtcaatggtagaataggaaatatcttcctatagaaactagacagaatgattctcagaaactcctttgtgatgtgtgcgttcaactcacagagtttaacctttcttttcgtagagcagttaggaaacactctgtttgtaaagtctgcaagtggatattcagacctccttgaggccttcgttggaaatgggatttcttcatattctgctagacagaagaattctcactaacttccttgtgttgtgtgtattcaactcacagagttgaacgatcctttacacagagcagacttgaaacactctttttgtggaatttgcaagtggagatttcagccgctttgaggtcaacggtagaaaaggaaatatctccgtataaagactagacagaatcattctcagaaactgctctgcgatgtgtgcgttcaactctcagagtttaacttttcttttcattcagcagtttggaaacactctgtttgtaaagtctgcacgtggatattttgaccatttagaggccttcgttggaaacgggtttttttcatgtaaggctagacagaagaattcccagtaacttccttgtgttgtgtacattcaactcacagagttgaacgttcccttagacagagcagatttgaaacactctttttgtgcaattggcaagtggtgatttcagccgctttgaggtcaatggtagaaaaggaaatatcttcctataaaaactagacagaatcattcccacaaactgcgttgtgatgtgttcgttcaactcacagagtttaacctttctgttcatagagcagttaggaaacactctgtttgtaaagtctgcaagtggatattcagacctccttgaggccttcgttggaaacgggatttcttcatattactgctagacagaataattctcagtaacttccttgtgttgtgtgtattcaactcacagagttgaaggatcctttacagagagcaggcttgaaacactctttttgtcgaatttgcaagtggagatttcagccgctttgtggtcaatggtagaaaagtaaatatcttcctataaagactagacagaatgattctcagaaactcctttgtgatgtgtgcgttcaactcacagagtttaacctttcttttcatagagcagttaggaaacactctgtttgtaaagtctgcaagtggatattcagacaactttgaggccttcgttggaaacgggatttcttcatgttctgctagacagaagaattcccagtaactttccttgtgttgtgtgtgttcaactcacagagttgaactctcatttacacagagcagatttgaaacactctttttgtggaatttgcaagtggagatttcaagcgctttgaggccaaaggcagaaaaggaaatatcttcgtataaaaactagacagaatcattctcagaaactgttgcgtgatgtgtgcgttcaactctcagagtttaacttttcttttcattcagcggtttggaaacactctgtttgtaaagtctgcacgtggatattttgaccacttagaggccttcgttggaaacgggttttttttcatgtaaggctagacagaagaattcccagtaacttccttgtgttgtgtgcattcaactcacagagttgaacgttcccttagacagaccagatttgaaacactctatttgtgcaatttgcaagtgtagatttcaagcgctttgaggtcaatggcagaaaaggaaatatcttcgtttcaaaactagacagacaatcattctcacaaactacgttgtgatgtgttcgttcaactcacagagtttaaactttctgttcatagagcagttaggaaacattctgtttgtaaagtctgtaagtggatattctgacatcttgtggccttcgttggaaacgggatttcttcatattctgctagacagaagaattctcagtaacttccttgtgttgtgtgtattcaactcacagagttgaacgatcctttacacagagcagacttgaaacactctttttgtggaatttgcaagtggagatttctgccgctttgaggtcaatggtagaataggaaatatcttcgtataaaaactagacagaatgattctcagaaactcctttgtgctgtgtgtgttcaactcacagagtttaacctttcttttcatagagcagttaggaaacactctgtttgtaaagtctgcaagtggatattcagacctctttgaggccttcgttggaaacgggtttttttcatataaggctagacagaagaattctcagtaacttccttgtgttgtgtgtattcaactgacagagttgaactttcctttagagagagcagatttgaaacactgtttttgtggaatttgcaagtggagatttcaagcgctttggggccaaaggcagaaaaggaaatatcttcgtataaaaactagacagaatcattctcagaaactgctctgcgatgtgtgcgttcaactctcagagtttaacttttcttttcattcagcagtttggaaacactctgtttgtaaagtctgcacgtggatatttgaccacttagaggccttcgttggaaacgggtttttttcctgtaaggctagacagaataaatcccagtaacttccttgtgttgtgtgcattcaactcacagagttgaacgttcccttagacagagcagatttgaaacattctatttgtgtaatttgcaagtgtagatttcaagcgctttaaggtcaatggcagaaaaggaaatatcttcgtttcaaaactagacagaatcattcccacaaactgcgttgtgatgtgttcgttcaactcacagagtttaacctttctgttcatagagcagttaggaaacactctgtttgtaaagtctgtaagtggatattctgacatcttgtggccttcgttttaaacgggatttcttcatattctgctagacagaagaattctcagtaacttctttgtgttgtgtgtattcaactcacagagttgaacgatcctttacacagagcagactggaaacactctttttgtggaatttgcaagtggagatttcagccgctttgaggtcaatgttagaataggaaatatcttcctatagaaactagagagaatgattctcataaactcctttgtgatgtgtgcgttcaactcacagagtttaacctttcttttcatagagcagttaggaaacactctgtttgtaaattctgcaagtggatattcagacctccttgaggccttcgttggaaacgggatttcttcatattctgctagacagaaaaattctcagtaacttccttgtgttgtgtgtattcaactcacagagttgaacgatcctttacacagagcagacttgaaacgctctttttgtggaatttgcaagtggagatttcagccgcgttgaggtcaatggtagaaaaggaaatatcttcgtataaaaactagacagaatgattctcaaaaactcctttgtgatgtgtgcgttcaactcacagagtttaacctttctgttcatagagcagttaggaaacactctgtttgtaaagtctgcaagtggatattcagacctccttgaggccttctttggaaacgggatttcttcatattctgatagacagaagaattctcagtaacttccttgtgttgtgtgtattcaactcaaagagttgaacgatcctttacacagagcagacttgaaacacactttttgtggaatttgcaagtggagatttcagccgctttgaggtcaaaggtagaaaaggaaactatgttcgtataaagagtagacagaatgattctgagaaactcctttgtgatgtggcgttcaactcacagagtttaacctttcttttcatagagcagttaggaaacactctgtttgtaacgtctgcaagtggatattcagacctccttgaggccttcgttggaaacgggttttcttcatattatgctagacagaagaattctcattaacttccttgtgttgtgtgtattcaactcacagagttgaacgatcctttacacagagcagacttgaaacactctttttgtggaatttgcaagtggagatttcagccgctttgagttcaatggtagaataagaaatatcttcctatagaaactatacagaatgattctcagaaactcctttgtgatgtgtgcattcaactcacagagtttaacctttcttttaatagagcagttaggaaacactctgtttgtaaagtctgcaagtggatattcagacctccttgaggccttcgttggaaacgggatttcttcatattatgctagacagaagaattctcagtaacttccttgtgttgtgtgtattcaactgacagagttgaactttcatgtagagagagcagatttgaaacactgtttttgtggaatttgcaagtggagatttcaagcgctttggggccaaacgcagaaaaggaaatatcttcgtataaaactagacagaatcattctcagaaactgctctgcgatgtgtgcgttcaactctcagagtttaacttttcttttcattcagcagtttggaaacactctgtttgtaaagtctgcacgtggatattttgaccacttagaggccttcgttggaaacgggtttttttcctgtaaggctagaaagaagaattcccagtaacttcccttgtgttgtgtacattcaactcacagagttgaacgttaccttagacagagcagatttgaaacactctttttgtgcaattggcaaatggagatttcaagcgctttaaggtcaatggcagaaaaggaaatatcgtcgtttcaaaactagacagaatcattcccacaaactgcgttgtgatgtgttcgttcaactcacagagtttaacctttcttttcatagagcagttaggaaacagtctgtttgtcaattctgtaagtggatattctgacatcttgtggccttcgttggaaacgggatttcttcatattctcctagacggaagaattctcagtaacttccttgtgttttgtgtattcaactcacagagttgaatgatcctttacgcagaacagacttgaaacactctttttgtggaatttgcaagtggagatttcagccgctttgaggtcaatggtagaaaaggaaatatattcgtataaaaactagacagaatgattctcagaaacttctttgtgatgtgtgcgctcaactcacagagtttaacctttcttttcatagagcagttagggaacactctgtttgtaaagtctgcaagtggatattcagacctctttgaagccttcgttggaaacgggatttcttcatattatgctagacagaagaattctcagtaacttccttgtgttgtgtgtattcaactcacagagttcaacgatccgttacacagagcagacttgaaacactctttttgtggaatttgcaagtggagatttctgccgctttgaggtcaatggtagacaaggaaatatcttcgtataaaaactagacagaatcattctcagaaactgctctgcgatgtgtgcgttcaactctcagagtttaacttttcttttcattcagcagtttggaaacactctgtttgtaaagtctgcacgtggatattttgaccacttagaggccttcgttggaaacgggtttttttcctgtaaggctagacggtagaattcccagtaactttccttgtgttgtgtacattcaactcacagagttgaacgtttccttagagagagcagatttgaaacactctttttgtgcaattggcaagtggtgatttcagccgctttgaggtcaatggtagaaaaggaaatatcttcgtataaaaactagacagaatcattcccacaaactgcgttgtgatgtgttcgttcaactcacagagtttaacctctccgttcatagagcagttaggaaacacactgtttgtaaagtctgtaagtggatattctgacatcttgtggccttcgttggaaacgggatttcttcatattctgctagacagaagaattctcagaatcttccttctgttgtgtgtattcaactcacagagttgaacgatcctttacacagagcagacttgaaacactctttttgtggaatttgcaagtggagatttcagccgctttgaggtccatggtagaaaaggaaatatcttcgtataaaaactagacagaatgattctcagaaaatcttttgtgatgtgtgcgttcaactcacagagtttaacttttcttctcgtagagcagttaggaaacactctgtttgtaaagtctgcaagtggatattcagacctctttgaggtcttcgttggaaacgggatttcttcatattatgctagacagaagaattctcagtaacttccttgtgttgtgtgtattcaactcacagagttgaacgaccctttacacagagcagacttgtaacactctttttgtggaatttgcaagtggagatttcagccgctttcaagtcaaaggtagaaaaggaaatatcttcctataaaaactagacagaacgattctcagaaactcctttgtgatgtgtgcgttcaactcacagagtttaacttttcttttcatagagccattaggaaacactctgtttgtaaagtctgcatgtggatattcagacctcctagaggccttcgttggaaacgggatttcttcatattctgctagacagaagaattcccagtaacttctttctgttgtgtgtgttcaactcacagagttgaactttgatttacacagagcagatttgaaacactctttttgtggaatttgcaagtggagatttcaagcgctttgaggccaaaggcagaaaaggaaatatcttcgtataaaaactagacagaatcattctcagaaactgctgcgtgatgtgtgcgttcaactctcagagtttaacttttcttttcattcagcggtttggaaacactctgtttctaaagtctgcacgtggatattttgaccacttagacgccttcgttggaaacgggtttttttcatgtaaggctagacagaagaattcccagtaacttccttgtgttgtgtacattcaactcacagagttgaacgttcccttagacagagcagatttgaaacactctttttgtgcaattggcaagtggtgatttcagccgctttgaggtcaatggtagaaaaggaaatatcttcgtataaaaactagacagaatcattcccacaaactgcgttgtgatgtgttcgttcaactcacagagtttaacctttcttttcatagaccagttaggaaacagtctgtttgtaaattctgtaagtggatattctgacatcttgtggccttcgttggaaacgggatttcttcatattctgctagacagaagaattctcagtaacttccttgtgttgtgtgtattcaactcacagagttgaacgatcctttacacagagcagacttgtaacactctttttgtggaatttgcaagtggggatttcagccgctttgaagtcaaaggtagaaaaggaaatatcttcctataaaaactagacagaatgattctcagaaactcctttgtgatgtgtgtgttcaactcacagagtttaaccttacttttcatagagcagttaggaaacactctgtttgtaaagtctgcaagtggatattcagacctctttgaggccttcgttggaaacgggtttttttcatataaggctagacagaagaattcccagtaacttccttgtgttgtgtgtgttcaactcacagagttgaactttcatttacacagagcagatttgaaacactctttttgtggaatttgcaagtggagatttcaagcgctttgaggccaaaggcagaaatggaaatatcttcgtttcaaaactagacagaatcattctcagaaactgctctgcgatgtgtgcattcaactctcagagtttaacttttcttttcattcagcagtttggaaacactctgtttgtaaagtctgcacgtggatattttgaccacttagaggccttctttggaaacgggtttttttcctgtaaggctagacagaagaattcccagtaacttccttgtgttgtgtgcattcaactaacagagttgaacgttcccttaaacagagcagatttgaaacactctatttgtgcaatttgcaagtgtagatttcaagcgctttaaggtcaacggcagaaaaggaaatatcttcgtttcaaaactagacagaatcattcccacaaactgcgttgtgatgtgttcgttcaactcacagagtttaaccattcttttcatagagcagttaggaaacagtctgtttgaaaattctgtaagtggatattctgacatcttgtggccttcgttggaaacgggatttcttcatattctgctagacagaagaattctcagtaacttccttgtgttgtgtgtattcaactcacagagttgaacgatcctttacacagagcagacttgaaacactctttttgtggaatttgcaagtggagatttcagccgctttgaggtcaatggtagaaaaggaaatatctttgtataaagactagacagaatgattctcagaaactcctttgtgatgtgtgcgttcaactcacagagttcaacttttcttttcatagagcagttaggaaacactctgtttgtaaagtctgcaagtggatattcagacctctttgaggccttcgttggaaacgggattttttcatattctgctagacagaagaattcccagtaacttccttgagttgtgtgtgttcaaatcacagagttgaactttcatttacacagagcagatttgaaacactctttttgtggaatttgcaagtggagatttcaagcgctttgaggccaaaggcagaaaaggaaatatctccgtttcaaaactagacagaatcattctcagaaaatgctctgtgaagtgtgcgttcaactctcagagtttaacttttcttttcattcagcagtttggaaacactctgtttgtaaagtctgcacgtggatattttgaccacttagaggccttcgttggaaacgggtttttttcatgtaagggtagacagaagaattcccagtaacttccttgtgttgtgtacattcaactcacagagttgaacgttcccttagacagagcagatttgaaacactctttttgtgcaattggcaagtggtgatttcagcctctttgaggtcaatggtagaaaaggaaatatcttcgtataaaaactagacagaatcattcccacaaactgcgatgtgatgtgttcgttcaactcacagagtttaacctttctgttcatagagcagttaggaaacactctgtttggaaagtctgtaagtggatattctgacatcttgtggccttcgttggaaacgggatttcttcatattctgctagacagaagaattctcagtaacttcccttgtgttgtgtgtattcaactcacagagttgaacgatcctttacacagagcagacttgaaacactctttttgtggaatttgcaagtggagatttcagccgcgttgaggtcaatggtagaaaaggaaatatcttcgtataaaaactagacagaatgattctcagaaactcctttgttatgtgtgcgttcaactcacagagtttaacttttcttttcatagagcagttaggaaacactctgtttgtaaagtctgcaagtggatattcagacctctttgacgccttcgttggaaacgggatttcttcatattctgctagacagaagaattctcagtaacttccttgtgttgtgtgtattcaactcacagagttgaacgatcctttacagagagcagacttgaaacactctttttgtggaatttgcaagtggagatttcagccgctttgaggtcaatggtagaaaaggaaatatcttcctctaaagactagacagaatcattctcagaaactgctctgcgatgtgtgcgttcaactctcagagtttaacttatcttttcattcagtagtttggaaacactctgtttgtaaagtctgcacgtggataatttgaccacttagaggtcttcgttggaaacgggtttttttcatgtaaggctagacagaagaattcccagtaacttccttgtgttgtgtacattcaactcacagagttgaacgttcccttagaaagagcagatttgaaacactctttttgtgcaattggcaagtggagatttcaagcaatttaaggtcaatggcagaaaaggaaatatcttcgtttcaaaactagacagaatgattctcagaaactcctttgtgatgtgtgcgttcaactcacagagtttaacttttcttttcatagagccgttaggaaacactctgtttgtaaagtctgcaagtggatattcagacctctttgaggccttcgttggaaacgggatttcttcatattctgctagacagaagaattctcagtaacttccttgtgttgtgtgtattcaactcagagacttgaatgatcctttacacagaacagtcttgaaacactctttttgtggaatttgcaagtggagatttcagccgctttgaggtcaatggtagaataggaaatatcttcctatagaaactagacagaacgattctcagaaactcctttgtgatgtgtgcgttcaactcacagagtttaacctttcttttcatacagcagttaggaaacactctgtttgtaaagtctgcaagtggatattcagacctctttgagaccttcgttggaaacgggatttcttcatattctgctagacagaagaattctcagtaacttccttgtgttgtgtgtattcaactcacagagttgaatgatcctttacagagagcagacttgaaacactctttttgtggaatttgcaagtggagatttcagccgctttgaggtcaatggtagaataggaaatatcttcgaagaaaaactatacagaatgattctcagaaactgctttttgatgtgtgcgttcaactcacagcgtttaacctttcttttcatagagcagttaggaaacactctgtttgtaaagtctgcaagtggatattcagacctctttgaggccttcgttggaaacgggatttcttcatattctgctagacagaggaattctcagtaacttccttgtgttgtgtgtattcaactgacagagttgaactttcatttagagagagcagatttgaaacactgtttttgtggaatttgcaagtggagatttcaagcgctttggggccaaaggcagaaaaggaaataccttcgtataaaaactagacagaatcattctcagaaactgctgcgtgatgtttgcgttcaactctcagagtttaacttttcttttcattcagcggtttggaaacactctgtttgtaaagtctgcacgtggaaattgtgaccacttagaggccttcgttggaaacgggtttttttcatgtaaggctagacagaagaattcccagtaacttccttgtgttgtgtgcattcaactcacagagttgaacgttcccttagacagagcagatttgaaacactctatttgtgcaatttgcaagtgtagttttcaagctctttaaggtcaacggcagaaaaggaaatatcttggtttcaaaactagacagaatcattcccagaaactgcgttgtgatgtgttcgttcaactcacagagtttaacctttctgttcatagagcagttaggaaacactctgtttgtaaagtctgtaagtggatattcagacatcttgtggccttcgttggaaacgggatttcttcatattctgctagacagaagaattctcagtaacttccttgtgttgtgtgtattcaactcacagagttgaacgatcctttacacagagcagacttgaaacactctttttgtggagtttgcaagtggagatttcagccgctttgaggtcaatggtagaaaaggaaatatcttcgtataaagactagacagaacgattctcagaaactcctttgtgatgtgtgcgttcaactcacagagtttaacctttcttttcatagagcagttaggaaacactctgtttgtaaagtctgcaagtggatattcagacctctttgaggccttcgttggaaacgggatttcttcatattctgctagaaagaagaattctcagtaacttccttgtgtggcgtgtattcaactgacagagttgaactttcatttagagagagcagatttgaaacactgtttttgaggaatttgcaagtggagatttcaagcgctttggggccaaaggcagaaaaggaaatatcttcgtataaaaactagacagaatcattctcagaaactgctctgcgatgtgtgcgttcaactctcagagtttaaatttccttttcattcagcagtttggaaacactctgtttgtaaagtctgcacgtggataacttgaccacttagaggccttcgttggaaacgggtttttttcatgtaaggctagacagaagaattcccagtaacttccttgtgttgtgtgcattcaacacacagagttgaacgttcccttagacagagcagatttgaaacactctatttgtgcaatttgcaagtgtagatttcaagcgctttatggtcaacagcagaaaaggaaatatcttcgtttcaaaactagacagaatcattctcagaaactgctgcgtgatgtgtgcgttcaactctcagagtttaacttttcttttcattcagctgtttggaaacactctgtttgtaaagtctgcaagtggatattcagacctcttgaggccttcgttggaaacgggatttcttcatattatgctagacagaataattctcagtaacttccttttgttctgtgtattcaactcacagagttgaacgatcctttacagagagcagacttgaaacactctttttgtggaatttgcaagtggagatttcagccgctttgaggtcaatggtagaaaaggaaatatcttcgtataaagactagacagaatcattctcagaaactgctctgcgatgtgtgcgttcaactctcagagtttaacttttcttttcattcagctgtttggaaacactctgtttgtaaagtctgcacgtggatattttgaccacttagaggccttcgttggaaacgggtttttttcctgtaaggctagacagaagaattctcagtaacttccttgtgttgtgtgtattcaactcacagagttgaatgatcctttacacagagcagacttgaaacactctttttgtggaatttgcaagtggagatttcatccgctttgaggtcaatggtagaaaaggagactatcttcatataaagactagacagactgattcccagaaactcctttgtgatgtgtgcgttcaactcacagagtttaacctttcttttcatagagcagttaggaaacactctgtttgtaaagtctgcaagtggatattcagacctctttgaggccttcgttggaaacgggtttttttcatataaggctagacagaagaattctcagtaacttccttgtgttgtgtgtattcaactgacagagttgaactttcatttagggagagcagatttgaaacactgtttttgtggaatttgcaagtggagatttcaagcgctttggggccaaaggcagaaaaggaaatatcttcgtataaaaactagacagaatcattctcagaaactcctgcgtgatgtgtgcgtccaactctcagagtttaacttttcttttcattcagcggtttggaaacactctgtttgtaatgtctgcacgtggttattttgaccacttagaggccttcgttggaaacgggtttttttcatgtaaggctagacagaagaattcacagtaacttccttgtgttgtgtgcattcaactcacagagttgaacgttcccttagacagagcagatttgaaacactctatttgtggaatttgcaagtgtagatttcaagcgctttaaggtcaatggcagaaaaggaaatatcttcgtttcaaaactagacagaatccttcccacaaactgcgttgtgatgtgttcgtccaactcacagagtttaacttttcttttcatagagcagttaggaaacagtctgtttgtaaagtctgtaagtggatattctgacctcttgtggccttcgttggaaacgggatttcttcatattctgctagacagaagaattctcagaatcttccttgtgttgtgtgtattcaactcacagagttgaacgatcctttacacagagcggacttgaaacactctttttgtggaatttgcaagtggagatttcagccgctttgaggtccatggtagaaaaggaaatatcttcgtataaaaactagacagaatgattctcagaaactcctttgtgatgtgtgcgttcaactcacagagtttaacctttcttttcatagagcagttaggaaacactctgtttgtaaagtctgcaagtggatattcagacctccctgaggccttctttggaaacgggatttgtccatattatgctagacagaagaattctcagtaacttccttgtgttgtgtgtattcaactgacagagttgaactttcatttagagagagcagatttgaaactctgtttttgtggaatttgcaagtggagatttcaagcgctttggggccaaaggcagaaaaggaaatatcttcgtataaaaactagacagaatcattctcagaaactgctgcgtgatgtgtgcgttcaactctcagagtttaacttttcttttcattcagcggtttggaaacactctgtttgtaaagtctgcacgtggaaaatttgaccacttagaggccttcgttggaaacgggtttttttcatgtaaggctagacagaagaattcccagtaacttccttgggttgtgtgcattcaactcacagagttgaacgttcccttagacagagcagatttgaaacactctatttgtgcaatttgcaagtgtagatttcaagcgctttaaggtcaacggcagaaaaagaaatatcttcttttcaaaactagacagaatcattcccacaaactgcgctgtgatgtgttcgttcaactcacagagtttaacctttctgttcatagagcagttaggaaacactctgtttgtaaagtctgcaagtggatattcagacctccttgaggccttcgttggaaacgggatttcttcatattctgctagacagaagaattctcagtaacttccttgtgttgtgtgtattcaactcacagagttgaacgatcctttacacagagcagacttgaaacactctttttgtggaatttgcaagtggagatatcagccgctttgaggtcaatggtagaataggaaatatcttcatataaaaactagacagaatgattctcagaaactcctttgtgatgtgtgcgttcaactcacagagtttaacctttcttttcatagagcagttaggaaacactctgtttgtaaagtctgcaagtggatattcagacatccttgaggctttcgttggaaacgggatttctttatattctgctagaaagaataattctcagtaacttccttgtgttgtgtgtattcaactcacagatttgaacgatccattacagagagcagacttgaaacactctttttgtggaatttgcaagtggagatttcagccgctttgaggtcaatggtagaataggaaatatcttcctatagaaactagacagaatgattctaagaaactcctttgtgatgtgtgcgttcaactcacagagtttaacctttcttttcatagagcagttaggaaacactctgattgtaaagtctgcaagtggatattcagacctccttgaggccttcgttggaaacgggatttcttcatattatgctagacagaagaattctcagtaacttccttgtgttgtgtgtatgcatctcactgagttgaacgatcctttgcacagagcagacttgaaacactctttttgtggaatttgcaagtggagatttcagccgctttgaggtcaatggtagaaaaggaaatatcttcgtataaaaactagacagaatgattctcagaaacttctttgtgatgtgtgcgttcaactcacagagtttaacctttcttttcatagagcagttaggaaacactctgtttgtaaactctgcaagtggatatatagacctctttgaggccttcgttggaaacgggatttcttcatagtatgctagacagaagaattctcagtaacttccttgtgttgtgtgtattcaactgacagagttgaactttcatttagagagagcagatttgaaacactgtttttgtggaatttacaagtggagatttcaagcgctttggggccaaaggcagaaaaggaaatatcttcgtataaaaactagacagaatcattctcagaaactgctgcgtgatgtgtgcgttcaactctcagagtttaacctttcttttcattcagcggtttggaaacactctgtttgtaaagtctgcacgtggatattttgaccacttagaggccttcgttggaaacgggtttttttcatgtaaggatagacagaagaaattcccagtaacttccttgtgttgtgtgcattcaactcacagagttgaacgttcccttagacagagcagatttgaaacactctatttgtgcaatttacaagtgtagatttcaagcgctttaaggtcaacggcagaaaaggaaatatcttcgtttcaaacctagacagaatcattcccacaaactgcgttgtgatgtgttcgttcaactcacagagtttaacctttctgttcatagagcagtaaggaaacactctgtttctaaagtctgtaagtggatattctgacatcttgcggccttcgttggaaacgggatttcttcatattctgctagacagaagaattctcagtaacttccttgtgttgtgtgtattcaactcacagagttgaacgatcctttacacagagcagacttgaaacactctttttgtggaatttgcaagtggagatttcagccgctttgaggtcaatggtagaaaaggaaatatcttcgaataaagactagacagaatgattctcagaaaatcttttgtgatgtgtgcgttcaactcacagagtttaacttttcttctcatagagcagttaggaaacactctgtttgtaaagtctgcaagtggatattcagacctcttagaggtcttcgttggaaacgggatttcttcatattatgctagacagaagaattctcagtaacttccttgtgttgtgtgtattcaactgacagagttgaactttcatttagagagagcagatttgaaacactgtttttgtggaatttgcaagtggagatttcaagcgctttggggccaagggcagaaaaggaaatatcttcgtataaaaactggacagaatcattctcagaaactgctgcgtgatgtgtgcgttcaactctcagagtttaacttttcttttcattcagcggtttggaaacactctgtttgtaaagtctgcacgtggatattttgaccacttagaggccttcgttggaaacgggttttttttcatgtaaggctatacagaagaattcccagtaacttccttgtgttgtgtgcattcaactcacagagttgaacgttcccttagacagagcagatgtgaaacactctatttgtgcaatttgcaagtgtagatttcaagcgctttaaggtcaatggcagaaaaggaaatatcttcgtttcaaaactagacagagatcattcccacaaactgcgttgtgatgtgttcgttcatctcacagagtttaacctttcttttcatagagcagttaggaaacactatgtttgtaaattctgtaagtggatattctgacatcttgtggccttcgttggaaacgggatttcttcatattctgctagacagataattctcagtaacttccttgtgttctgtgtattcaactcacagagttgaacgatcctttacagagagcagactttaaacactctttttgtggaatttgcaagtggagatttcagccgctttgaggtcaatggtagaaaaggaaatatcttcgtacaaagactagacagaatgattctcagaaactcctttgtgatgtgtgcgttaaactcacagagttttacctttctgttcatagagcagttaggaaacactctgtttgtaaagtctgcaagtggatattcagacctccttgaggccttcgttggaaacgggatttcttcatattctgctagacagaagaattctcaataacttccttgttttgtgtgtattcaactcacagagttgaacgatcctttacacagagcagacttgtaacactctttttgtggaatttgcaagtggagatttcagccgctttgaagtcaaaggtagaaaaggaaatatcttcctataaaaactagacagaatgattctcagaaactcctttgtgctgtgtgcgttcaactcacagagtttaacctttcttttcatagagcaattaggaaactctctgtttgtaaagtctgcaagtggatattcagacatctttgaggctttcgttggaaacgggatttcttcatattctgctagacagaagaattctcagaaatttccttttgttgtgtgttttcaactcacagagttgaacgaacctttacacagagtagacttgaaacactctttttgtggaattggcaagtggagatttcagccgctttgaggtcaatggtagaaaaggaaatatcttcgtataaaaactagacagaatgattctcagaaacttctttgtgatgtgtgcgttcaactcacagagtttaacctttcttttcatagagcagttagggaacactctgtttgtaaactctgcaagtggatattcagacctctttgaggccttcgttggaaacgggatttcttcatactatgctagacagaagaattctcagtaacttccttgtgttgtgtgtattcaactcatagagttgaacgatcctttacacagagcagacttgtaacactctttttgtggaatttgcaagtggagatttcagccgctttgacgtcaaaggtagaaaaggaaatatcttcctataaaaactagacagaatgattctcataaactcctttgtgatgtgtgcgttcaacgcacagagtttaacctttcttttcatagagcagttaggaaacactgtgtttgtaaagtctgcatgtggatattcagacctccttgaggccttcgttggaaacgggaattcctcatattctgctagacagaagaattcccagtaacttccttgtgttgtgtgtgttcgactcacagagttgaactttcatttacacagagcagatttgaaacactctttttgtggaatttgcaaatggagatttcaagcgctttgaggccaaaggcagaaaaggaaatatctttgtataaaaactagacagaatcattctcagaaactgctctgcgatgtgtgcgttcaactctcagagtttaacttttcttttcattcagcagtttggaaacactctgtttgtaaagtctgcacgtggataacttgaccacttagaggccgtcgttggaaacgggttttgttcatgtaaggctagacagaagaattcccagtaacttccttgtgttgtgtacattcaactcacagagttgaacgttcccttagacagagcagatttgaaacactctttttgtggaattggcaagtggtgatttcagccgctttgaggtcaatggtagaaaaggaaatatcttcgtataaaaactagacagaatcattcccacaaactgcgttgtgatgtgttcgttcaactcacagagtttaacctttcttttcatagaccagttaggaaacagtctgtttgtcaattctgtaagtggatattctgacatcttgtggccttcgttggaaacgggatttcttcatattctgctagaaagaagaattctcagaatcttccttgtgttgtgtgtattcaactcaaagagttgaacgatcctttacacagagcaggcttgaaacactctttttgtggaatttgcaagtggagatttcagccgctttgaagtcaatggtagaaaaggaaatatcttcgtataaaaactagacagaatgattctcagaaacttctttgtgatgtgtgcgttcaactcacagagtttaacctttcttttcatagagcagttaggaaacactctgtttgtaaactctgcaagtggatattcagacctctttgaggccttcgttgtaaaagggatttcttcatactatgctagacagaagaattctcagtaacttccttgtgttgtgtgtattcaactcacagagttgaacgattctttacacagagcagacttgtaacactctttttgtggaatttgcaagtggagatttcagcctctttgaagtcaaaggtagaaaaggaaatatcttcctataaaaactagacagaatgattctcagaaactcctttgtgatgtgtgcgtgcaactcacagagtttaacttttcttttcatagagcagttaggaaacactctgtttgtaaagtctggaagtggatattcagacctccttgaggccttcgttggaaacgggatttcttcatattctgctagacagaagaattcccagtaacttccttgtgttgtgtgtgttcgactcacagagttgaactttcatttacacagagcagatttgaaacactctttttgtggaatttgcaaatggagatttcaagcgctttgaggccaaaggcagaaaaggaaatatcttcgtataaaaactagacagaatgattctcagaaactcctttgtgatgtgtgtgttcaactcacagagattaacctttcttttcatagagcagttaggaaacactctgtttgtaaagtctgcaagtggatattcagacctctttgaggccttcgttggaaacgggatttctccatactatgctagacagaagaattctcagtcacttccttgtgttgtgtgtattcaactcacagagttgaacgatcctttacacagagcagacttgaaacactctttttgtggaatttgcaagtggagatttcagcagctttgaggtcaatagtagaaaaggaaatatcttcgtagaaaaactagacagaatgattctcagaaactcctttgtgatgtgtgcgttcaagtcacagagtttaacctttcttttcatagagcagttaggaaacactctgtttgtaaagtctgcaagtggatattcagacctctttgaggccttcgttggaaacgggatttcttcatattctgttagacagaagaattctcagtaacttcccttgtgttgtgtgtattcaactgacagagttgaactttcatttagagagagcagatttgaaacactgtttttgtggaatttgcaagtggagatttcaagcgctttgtggccaaaggcagaaaacgaaatatcttcgtataaaaactagacagaatcattctcagaaactgctctgcgatgtgtgcgttcaactctcagagtttaactttgcttttcattcagcagtttggaaacactctgtttgtaaagtctgcacgtggataatttgaccacttagaggccttcgttggaaacgggtttttttcctgtaaggctagacagaagaattctcagtaacttccttgtgttgtgtgtattcaactcacagagttgaacgatcctttacagagagcagactttaaacactctttttgtggaatttgcaagtggagatttcagccgctttgaggtcaatggaagaaaaggaaatatcttcgtataaagactagacagaatgattctcagaaactcctttgtgatgtgtgcgttcaactcacagagtttaacctttcttttcatagagcagttaggaaacactctgtttgtaaagtctgcaagtggatattcagacctctttgaggccttcgttggaaacgggttttttccatataaggctagtcagaagaattctcagtaacttccttgtgttgtgtgtgttcaactcacagagttgaaatttcatttacacagagcagatttgaaacactctttttgtggaaattgcaaatggagatttcaagcgctttgaggccaaaggcagaaaaagaaatatcttcgtataaaaactggacagaatcattctcagaaactgctctgcgatgtgtgcgttcaactctcagagtttaactttgcttttcattcagcagtttggaaacactctgtttgtaaagtctgcacgtggataatttgaacacttagaggccttcgttggaaacgggtttttttcatgtaaggctagacagaagaattcccagtaacttccttgtgttgtgtacattcaactcacagagttgaacgttcccttagacagagcagatttgaaacactctttttgtgcaattggcaagtggtgatttcagccgctttgaggtcaatggtagaaaaggaaatatcttcgtataaaaactagacagaatgattctcagaaactcctttaggatgtgtgcgttcaactcacagggtttaacctttcttttcatagagtagttaggaaacactctgtttgtaaactctgcaagtggatattcaaacctctttgaggccttcgttgcaaacgggatttcttcatattattgctgacagaagaattctcagaaacttcccttgtgttttgtgtattcaactcacagagttgaacgatcctttaaacagagcagacttgaaacactctttttgtggaatttgcaagtggagatttcagccgctttgaggtcaatggtagaaaaggaaatatcttcgtataaaaactagacagaatgattctgagaaactcctttgtgatgtgtgcgttcaactcacagagtttaacctttcttttcatagagcagttaggaaacactctgtttgtaaagtctgcaagtggatattcagacctctttgaggccttcgttggaaacgggattttttcatataaggctagacagaagaattctcagtaacttccttgtgttgtgtgtattcaactcacagagttgaacgatcctttacacagagcagacttgaaacagtctttttgtggaatttgcaagtggagatttcagccgctttgaggtcaatggtagaataggaaatatcttcctatagaaactagacagaatgattctcagaaactcctttgtgatgtgtgcgttcaactcacagagtttaacctttcttttcatagagcagttaggaaacactctgtttgtaaagtctgcaagtggatattcagacatccttgaggctttcgttggaaacgggatttcttcatattctgctagacagaagaattcccagtaacttccttgtgttgtgtgtgttcaattcacagagttgaactttcatgtacacagagcagatttgaaacactctttttgtggaatttgcaaatggagatttcaagcgctttgaggccaaaggcagaaaaggaaatatcttcgtataaaaactagacagaatcattctcagaaactgctctgcgatgtgtgcgttcaactctcagagtttaacttttcttttcattcagcagtttggaaacactctgtttgtaaagtctgcacgtggatattttgaccacttagaggccttcgttggaaacggttttctttcctgtaaggctagacagaagaattcccagtaacttccttgtgttgtgtgcattcaactcacagagttgaacgttcccttagactgagcagatttgaaacactctatttgtgcaatttgcaagtgtagatttcaagcgctttaaggtcaatggcagaaaaggaaatatcttcgtttcaaaactagacagaatcattcccacaaactgcgttgtgatgtgttcgttcaactcacagagtttaacctttctgttcatagagcagttaggaaacactctgtttgtaaagtctgcaagtggattttgagacctccttgaggccttcgttggaaacgggatttcttcatattctgctagacagaagaattctcagtaacttccttgtgttgtgtgtattcaactcacagagttgaacgatcctttacacagagcagacttgtaacactctttttctggaatttccaagtggagatttcagccgctttgaagtcaaaggtagaaaaggaaatatcttcctataaaaactagacagaatgattatcataaaatcctttgtgatgtgtgcgttcaactcacagagtttaacttttcttttcatagagcagttaggaaacactctgtttgtaaagtctgcaagtggatattcagacccctttgaggccttcgttggaaacgggatttcttcatattatgctagacagaagaattcccagtaacttccttgtgttgtgtgtgttcaactcacagagttgaactttcatttacacagagcagatttgaaacactctttttgtggaatttgcaagtggagatttcaagcgctttgaggccaaaggcagaaaaggaaatatcttcggtataaaaactagacagaatgattctcagaaactcctttgtgatgtgtgcgttcaactcacagagtttaacctttcttttcatagagcagttaggaaacactctgtttgtaaagtctgcaagtggatattcagacctctttgaggccttcgttggaaacgggatttcttcataatatgctagacagaagaattctcagtaacttccttgtgttgtgtgtattcaactcacagagttgaacgaacctttacacagagcagacttgaaacactctttttgtggaatttgcaagtgtagatttcatccgctttgaggtcaatggtagaaaaggaaatatcttcgtataaaaactagacagaatgattctcataaactcctttgtgatgtgtgcgttcaactcacagagtttaacttttcttttcatagagcagttaggaaacactctgtttgtaaagtctgcaagtggatattcagacctccttgactccttcgttggaaacgggatttcttcatattctgctagacagaaggattcccagtaacttccttgtgttgtgtgtgttcaactcacagagttgaactttcatttacaaagagcagatttgaaacactctttttgtggaatttgcaattggagatttcaagcgctttgaggccaaaggcagaaaaggaaatatcttcgtataaaaactagacaaaatgattctcagaatcttctttgtgatgtgtgtgttcaactcacagagtttaacctttcttttcatagagcagttaggaaacactctgtttgtaaactctgcaagtggatattcagacctcattgaggctttcgttggaaacgggatttcttcatactctgctagacagaagaattctcagtaacttccttgtgttgtgtgtattcaactcacagagttgaacgaccctttacacagagcggacttgaaacactctttttgtggaatttgcaagtggagatttcagccgcgttgaggtcaatggtagaaaaggaaatatcttcgtatagaaacttgacagaatgattctcagaaactcctttgtgatgtgtgcgttcaactcacagagttcaacctttcttttaatagagcagttgggaaacactctgtttctaaagtctgcaagtggatattcagacttctttgaggccttcgttggaaacgggatttcttcatattctgctagacagaagaattctcagtaacttccttgtgttgtgtgtattcaactgacagagttgaactttcatttagagagggcagatttgtaacactgtttttgtggaatttgcaagtggagatttcaagcgctttgcggccaaaggcagaaaaggaaatatcttcgtataaaaactagacagaatcattctcagaaactgctgcgtgacgcgtgcgttcaactctcaaagtttaacttttcttttcattcagcggtttggaaacactctgtttgtaaagtctgcacgtggatattttgaccacttagaggccttcgttggaaacgggtttttttcatgtaaggctagacagaagaattcccagtaacttccttgtgttgtgtacattcaactcacagagttgaacgttcccttagaaagagcagatttgaaacactctttttgtgcaattggcaagtggtgatttcagccgctttgaggtcaatggtataaaaggaaataccttcgtataaaaactagacagaatcattcccacaaactgcgttgtgatgtgttcgttgaactcacagagtttaacctttcttttcatagagcagttaggaaacagtctgtttgtaaattctgtaagtggatattctgacatcttgtggccttcgttggaaacgggatttcttcatattctgctagacagaagaattctcagaaacttccttgtgttttgtgttttcaactcacagagttgaacgatgctttacacagagtagacttgaaacactctttttgtgtaatttgcaagtggagatttcagccgctttgaggtcaatggtagaaaaggaaatatcttcgtataaaaactagacagaatgattctcagaaactcctttgtgatgtgtgcgttcaactcacagagtttaacctttcttttcatagagcagttaggaaacactctgtttgtaaagtctgcaagtggatattcagacctccttgaggccttcgttggatacgggatttcttcatattatgctagacagaagaattctcagtaacttccttgtgttgtgtgtattcaactcacagagttgaacgatcctttacacagagcagagttgaaacactctttttgtggaatttgcaagtggagatttcagccgctttgaggtcaatggtagaataggaaatatcttcctatagaaactagacagaatgattctcagaaaatcttttgtgatgtgtgcgttcaactcacagagtttaacttttcttctcatagagcagttaggaaacactctgtttgtaaagtctgcaagtggatattcagacctctttgaggccttcgttggaaacgggatttcttcatattatgcaagacagaataattctcagtaacttccttgtgttgtgtgtattcaactcacagagttgaaggatcctttacagagagcaggcttgaaacactctttttgtcgaatttgcaagtggagatttcagccgctttgaggtgaatggtagaataggaaatatcttcttatagaaactagacagaatcattctcagaaactgctctgcgatgtgtgcgttcaactctcagagtttaacttttcttttcattcagcagtttggaaacactctgtttgtaaagtctgcacgtggataatttgaccacttagaggccttcgttggaaacgggtttttttcatataaggctagacagaagaattcccagtatcttccttgtgttgtgtgcattcaactcacagagttgaacgttcctttagacagagcagattggaaacactctttttgtgcaatttgcaagtggagatttcaagcgctttaagggcaattgcagaaaaggaaatatcttcgtttcaaaactagacagaatcattcccacaaactgcgttgtgatgggtgcgttcaactcacagagtttaacctttcttttcatagagcagttaggaaacactctgtttgtaaagtctggaagtggatattctgacctctttgtggccttcgctggaaccgggatttcttcatataatactagacagaagaattctcagtaacttctttgtgttgtgtgtattcaactcacagagttgaacgatcctttacacagagcagacttgaaacactcgttttgtggaatttgcaagtggagatttcagccgctttgaggtccatggtagaaaaggaaatatcttcgtataaaaacttgacagaatgattctcatgaactcctttgtgatgtgtgcgttcaactcaaagagtttaacctttctgttcatagagcagttaggaaacactctgtttgtaaagtctgcaagtggatattcagacctccttgaggccttcgttggaaacgggatttcttcatattctgctagacagaagaattctcagtaacttccttgtgttgtgtgtattcaactcaaagagttcaacgatcctttatacagagcagacttgaaacactctttttgtggaatttgcaaatggagatctcagccgctttgtggtcagtagtagaaaaggaaatatcttcgtataaaaactagacagaatgattctcagaaacttctttgtgatgtgtgcgttcaactcacagagtttaacctttcttttcatagagcagttaggaaacactctgtttgtaaagtctgcaagtggatattcagacctctttgagcccttcgttggaaacgggtttttttcatttaaggctagacagaagaattctcagtaacttccttgtgttgtgtgtattcaactcaaagagttgaactttcatttagagagagcagatttgaaacactgtttttgtggaatttgcaagtggagatttcaagcgctttggggccaaaggcagaaaaggaaatatcttcgtataaaaactagacagaatcattctcagaaaactgctctgtgatgtgtgcgttcaactctcagagtttaacttttcttttcattcagcagtttggaaacactctgtttctaaagtctgcacgtggataatttgaccacttagaggccttcgttggaaacgggtttttttcatgtaaggctagacagaagaattcccagtaacttccttgtgttgtgtgcattcaactcacagagttgaacgttcccttagacagagcagatttgaaacactctatttgtgcaatttgcaagtgtagatttcaagcgctttaaggtcaacggcagaaaaggaaatatcttcgtttcaaaactagacacaatcattctcagaaactgctctgcgatgtgtgcgtgcaactctcagagtttaacttttcttttcattcagcagtttggaaacactctgtttgtaaagtctgcacgtggataacttgaccacttagaggccttcgttggaaacgggtttttttcatgtaaggctagacagaagaattctcagtaacttccttgtgttgtgtgtattcaactcacagagttgaacgatcgtttacacagagcagacttgtaacactctttttgtggaatttgcaagtggagatttcagccactttgaagtcaaaggtagaaaaggaaataacttcctataaaaactagacagaatgattctcagaaacttctttgtgatgtgtgcgttcaactcacagagtttaacctttcttttcatagagcagttaggaaacactctgtttgtaaactctacaagtggatattcacacctctttgaggccttcgttggaaacgggatttcttcatactgtgctagacagaagaattctcattaacttccttgtgttgtgtgtattcaactgacaaagttgaactttcatttagagagagcagatttgaaacactgtttttgtggaatttgcaagtggagatttcaagcgctttggggccaaaggcagaaaaggaaatatcttcgtataaaaactagacagaatcattctcagaaactgctccgtgatgtgtgcgttcaactctcagagtttaacttttcttttcattcagcggtttggaaacactctgtttgtaaagtctgcacgtggaaattttgaccacttagaggccttcgttggaaacgggattttttcatgtaaggctagacagaagaattccccgtaacttccttgtgttgtgtgcattcaactcacagagttgaacgttcccttagacagagcagatttgaaacactctatttgtgcaatttgcaagtgtagttttcaagctctttaaggtcaacggcagaaaaggaaatatcttcgtttcaaaactagacagaatcattcccacaaactgcgttgtgatgtgttcgttcaactcacagagtttaacctttctgttcatagagcagttaggaaacactctgtttgtaaagtctgtaagtggatattctgacatcttgtggccttcagttggaaacgggatttcttcatattctgctagacagaagaattctcagtaacttccttgtgttgtgtgtattcaactcacagagttgaacgatcctttacacagagcagacttgaaacactctttttgtggaatttgcaactggagatttcagccgctttgaggtcaatggtagaaaaggaaactatcttcatataaagactagacagaatgattctcagaaactcctttgtgatgtgtgcgttcaactcacagagtttaacctttcttttcatagagcagttaggaaacactctgtttgtaaagtctgcaagtggatattgagacatctttgaggctttcgttggaaacaggatttcttcatattctgctagacagaagaattctcagtaacttccttgtgttgtgtgtattaaactgacagagttgaactttcatttagagagagcagatttgtaaaactgtttttgtggaatttgcaagtggagatttcaagcgctttggggccaaaggcagaaaaggaattatcttggtataaaaactagacagaatcattctcagaaactgctctgcgatgtgtgcgttcaactctcagagtttaacttttcttttcattcagcagtttggaaacactctgtttgtaaagtctgcacgtggataacgtgaccacttagaggccttcgttggaaacgggtttttttcatgtaaggctagacagaagaattctcagaaacttccttgtgttgtgtgtattcaactcacagagttgaatgatcctttacacagagcagacttgaaacactctttttgtggaatttgcaagtggagatttcagccgctttgaggtcaatggtagaataggaaatatcttcctatggaaactagacagaatgattctcagaaactcctttgtgctgtgtgcgttcaactcacagagtttaacctttcttttcatagagcagttaggaaacactctgtttgttaagtctgcaggtggatattcagacctctttgaggccttcgttggaaaggggatttcttcatattatgctagacagaaagaattctcagtaacttccttgtgttgtgtgtattcaactgacagagttgaactatcatttagagagagcagatttgaaacactgtttttgtggaatttgcaagtggagatttcaagcgctttggggccaaaggcagaaaaggaaatatcttcgtataaaaactagacagaatgattctcagaaactcctttgtgatgtgggcgttcaactcacagagtttaacctttcttttcatagagcagttaggaaacactctgtttgtaaagtctgcaagtggatattcagacctctttgtggccttcattggaaacgggatttcttcatattctgctagagagaagtattctgagaaacttccttgcgttgtgtgtattcaactcacagagttcaacgatcctttacacagagcagacttgaaacactctttttgtggaatttgcaagtggagatttcagccgctttgaggtcaatggtagaataggaaatatcttcgtataaaaactagacagaaatgattctcagaaactcctttgtgatgtgtgcgttcaagtcacagagtttaacctttcttttcatagagcagttaggaaacactctgtttgtaaagtctgcaagtggatattcagacctctttgaggccttcgttggaaacgggatttcttcatattctgctagacagaagaattcccagtaacttccttgtgttgtgtgtcttcaactcacagagttgaactttcatttacacagagcagatttgaaacactctttttgtggaatttgcaaatggagatttcaagcgctttgaggccaaaggcagaaaaggaaatatcttcgtataaaaacttgacagaatcattctcagaaactgctctgcgatgtgtgcgtttaactctcagagtttaacttttcttttcattcagcagtttggaaacactctgtttgtaaagtctgcacgtggataatttgaccacttagaggccttcgttggaaacgggtttttttcatgtaaggctagacagaagaattctcagtaacttccttgtgttgtgtgtattcaactcacagagttgaacgatcctttacacagagcagacttgaaacattcttttggtggaatttgcaagtggagatttcagccgctttgaggtcaatggtagaataggaaatatcttcctatacaaactagacagagtgattctcagaaactcctttgtgatgtgtgcgttcaactcacagagtttaacctttcttttcatagagcagttaggaaacactctgtttctaaagtctgcaagtggatattcagacctctttgaggccttcgttggaaacgggtttttttcatataaggctagagagaagaattcccagtaacttccttgtgttgtgtgtgttccactcacagagttgaactttcgtttacacagagcagatttgaaacactctttttgtggaatttgcaagtggagatttcaagcgctttgaggccaaaggcagaaaaggaaatatcttcgtataaaaactagacagaatcattctcagaaactgctgcgtgatgtgtgcgttcaactctcagagtttaacatttcttttcattcagcggtttggaaacactctgtttgtaaagtctgcacgtggaaattttgaccacttagaggccttcgttggaaacgggtttttttcatgtaaggctagacagaagaattctcagtaacttccttgtgttgtgtgtattcaactcacagagttgaacgatcctttacacagagcagacttgtaacactctttttgtggaatttgcaagtggagatttcagccgctttgaagtcaaaggtagaaaaggaattatcttcctataaaaactagacagaatgattctcagaaactcctttgtgatgtgtgtgttcaactcacagagtttaacatttcttttcatagagcagttaggaaacactctgtttggaaagtctgcaagtggatattcagacctctttgaggccttcgttggaaacgggtttttttcatataaggctagacagaagaattctcagtaacttccttgtgttgtgtgtattcaactgacagagttgaactttcatttagagagagcagatttgaaactctgtttttgtggaatttgcaagtggagatttcaagggctttggggccaaaggcagaaaaggaaatatcttcgtataaaaactagacagaatcattctcagaaactgctgcgtgatgtgtgcgttcaactctcagagtttaacttttcttttcattcagcggtttggaaacactctgtttgtaaagtctgcacgtggataatttgaccacttagaggccttcgttggaaacgggttttttttcatgtaaggctagacagaagaattcccagtaacttccttctgttgtgtgcattcaactcacagagttgaacgttcccttagacagagcagatttgaaacactctatttgtgcaatttgcaagtatagatttcaagcgctttaaggtcaacggcagaaaaggaaatatcttcatttcaaaactagacagaatcattcccacaaactgcgttgtgatgtgttcgctcaacttacagagtttaacctttcttttcatagagcagttaggaaacagtctgtttgtaaattctgtaagtggatattctgacatcttgtggccttcgttggaaacgggatttcttcatattctgctagacagaagaattctcagtaacttccttgtgttgtgtttattcaactcacagagttgaatgatcctttacacagagcagacttgaaacactctttttgtggaaattgcaagtggagatttcagccgctttgaggtcaacggtagaaaagtaaatatcttcgtataaagactagacagaatgattctcagaaactcctttgtgatgtgtgcgatcaactcacagagtttaacctttcttttcatagagcagttaggatacactctgtttgtaaagtctgcaagtggatattcagacatccttgaggctttcgttggaaacgggatttcttcatattctgctagaaagaagaattcccagtaacttccttgtgttgtgtgtgttcaactcacagagttgaactttcatttacacagagcagatttgaaacactctttttgtggaatttgcaagtggaggtttcaagcgctttgaggccaaaggcagaaaaggaaatatcttcgtataaaaactagacagaatcattctcagaaactgctctgcgatgtgtgcgttcaactctcagagtttaacttttcttttcattcagcagtttggaaacactctgtttgtaaagtctgcacgtggataatttcaccacttagaggtcttcgttggaaacgggtttttttcatgtaaggatagacagaagaattcccagtaacttccttgtgttgtgtacattcaactcacagagctgaacgttcccttagacagagcagatttgaaacactctttttgtgcaattggcaagtggtgatttcagctgctttgaggtcaatggtagaaaagggaatatcttcgtataaaaactagacagaatcattcccacaaactgcgttgtgatgtgttcgttcaactcacagagtttaacctttctgttcatagagcagttaggaaacactgtgtttgtaaagtctgtaagtggatattctgacatcttgtggccttcgttggaaacgggatttcttcattttctgctagaaagtataattctcagtaacttccttgtgttgtgtgtattcaactcccagagttgaacgatcctttacacagagcagacttgaaacattctttttgtggaatttgcaagtggagatttcagctgctttgaggtcaatggtagaataggaaatatcttcctatagaaactagacagaatgattctcagaaagtcctttgtgatgtgtgcgttcaactcacagagtttaacctttcttttcatagagcagttaggaaacactctgtttgtaaagtctgcaagtggatattcagacctccttgaggccttcgttggaaacaggatttcttcatattctgctagacagaagaattctcagtaacttcccttgtgttgtgtgtattcaactcacagatttgaacgatcctttacagagagcagacttgaaacactctttttgtggaatttgcaagtggagatttcagctgctttgaggtcaatggtagaaaaggaaatatcttcgtagaaaaactagacagaatgattctcagaaacttctttgtgatgtgtgcgttcaactcacagagtttaacctttcttttcatagagcagttaggaaacactctgcttgtaaactctgcaagtggatattcagacctctttgaggccttcgttggaaacgggatttcttcatactatgctagacacaagaattctcagtaacttccttgtgttgtgtgtattcaactgacagagttgaactttcatttagacagagcagatttgaaacactctttttgtggaatttgcaagtagagatttcaagcgctttgagtccaaaggcagaaaaggaaatatcttcgtataaaaactagacagaatcattctcagaaactgctgcgtgatgtgtgcgttcaactctccgagtttaacttttcttttcattcagcggtttggaaacactctgtttgtaaagactgcacgtggatattttgaccacttagaggccttcgttggaaacgggttttttttcatgtaaggctagacagaagaattcccagtaacttccttgtgttgtgtgcattcaactcacagagttgaacgttcccttagacagagcagatttgaaacactctatttgtgcaatttgcaagtgtagatttcaagcgctttaaggtcaatggtagaaaaggaaatatcttcgtttcaaaactagacagaatcattcccacaaactgcgttgtgatgtgttcgttcaactcacagagtttaacctttcttttcatagagcagttaggaaacagtctgtttgtaaactctgcaagtggatattcagacctctttgaggccttcgttggaaacgggatttctccatactgtgctagacagaagaattctcagtaacttccttgtgttgtgtttattcaactcacagagctgaatgatcctttacacagagcagacttgaaacactctttttgtggaatttgcaagtggagatttcagccgctttgcggtcaatggtagaaaagtaaatatcttcgtataaagactagacagaatgattctcagaaactcctttgtgatgtgtgcgttcaactcacagagttcaacctttcttttcatagagcagttgggaaaccctctgtttgtaaagtctgcaagtggatattcagacttctttgaggccttcgttggaagcgggatttcttcatgttctgctagacagaaggattctcagtaacttccttgtgttgtgtgtattcaactcacagagttgaacgatcctttacacagagcagacttaaaacactctttttgtggaatttgcaagtggagatttcagccgctttgaggtcaatgttagaaaaggagatatcttcgtataaaaactagacagaatgattctcagaaactcctttgtgatgtgggcgttcaactcacagagtttaacctttcttttcatagagcagttaggaaacactctgtttgtaagattgcaagtggatattcagatatctttgaggctttcgttggaaacgggatttcttcatattctgctatacagaagaattctcagaaacttccttgtgttgtgtgtattcaactcacagagttgaacgatcgtttacacagagcagacttgagacactctgtttgtggaatttgtaagtggagatttcagccgctatgaggtcaatggtagaataggaaatatcttcctatagaaactagacagaatcattctcagaaactgctctgtgatgtgtgcgttcaactctcagagtttaacttttcttttcattcagcagtttggaaacactctgtttgtaaagtctgcacgtggataatttgaccacttagaggccttcattggaaaagggtttttttcatgtgaggctagacagaagaattcccagtaacttccttgtgttgtgtacattgaactcacagagttgaacgttcccttagacagagcagatttgaaacactctttttgtgcaattggcaagtggagatttcaagcgctttaaggtcaatggcagaaaaggaaatatcttcgtttcaaaactagacagaatcattcccacaaactgcgttgtgaggtgttcgttcaactcacagagtttaacctttcttttcatagagcagttaggaaacagtctgtttgtaaattctgtaagtggatattctgacatcttgtggccttctttggaaacgggatttcttcatattctgctagacagaagaattctcagtaacttccttgtgttgtgtgtattcaactcacagagttcaacgatcctttacacagagcagacttgaaacactctttttgtggaatttgcaagtggagatttcagccgacttgaggtcaatggtagaaaaggaaatatcttcttataaaaactagacagaatgattctcagaaactcctttgtgatgtgtgcgttcaactcacagagtttaacctttcttctcatagagcagttaggaaacattctgtttgtaaagtctgcaagtggatattcagacctctttgaggccttcgttggaaacgggatttcttcatattatgctagacagaagaattctcagtaacttccttgtgttgtgtgtattcaactcacagagttcaatgatcatttacacagagcagacttcaaacactctttttgtggaatttgcaagtggagatttcagccgacttgaggtcaatggtagaaaaggaaatatcttcgtataaaaactagacagaatgattctcagaaactcctttgtgatgtgtgcgttcaactcacagagtttcacctttcttttcatagagcagttaggaaacactctgtttctaaagtctgcaagtggatattcagacctctttgaggccttcgttggaaacgggtttttttcatataaggctagagagaagaattcccagtaacttccttgtgttgtgtgcgttcaactcacagagttgaactttcatttacacagagcagatttgaaacactctttttgtggaatttgcaagtggagatttcaagcgctttgaggccaaaggcagaaaaggaaatatcttcgtttcaaaactagacagaatcattctcagaaagtgctctgcgatgtgtgcgttcaactctcagagtttaacttttcttttcattcagcagtttggaaacactctgtttgtaaagtctgcgcgtggatattttgaccacttagaggccttcgttggaaacgggtttttttcttgtaaggctagacagaagaattcccaggaacttccatgtgttgtgtacattcaactcacagagttgaacgttcccttagacagagcagatttgaaacactctttttgtgcaattggcaagtggtgatttcagccgctttgaggtcaatggtagaaaaggaaatatcttcgtataaaaactagacagaatgattctcagaaacttcattgtgacgtgtgcgttcaactcacagagtttaacctttcttttcatagagcagttaggaaacactctgtttgtaaagtctgcaagtggatattcagacctctttgaggccttcgttggaaacgggatttcttcctactgtgctagacagaagtattctcagtaacttccttgtgttgtgtgtattcaactcacagagttgaacgatcctttacacagagcagacttgaaacactgtttttgtggaatttgcaagtggagatttcaagcgctttgaggctaaaggcagaaaaggaaatatcttcgtttcaaaactagacagaatcattctcagaaactgctctgcgatgtgtgcgttcaactctcagagtttaacttttcttttcattcataagtttggaaacactctgtttgtaaagtctgcacgtggataacttgaccacttagaggccttcgttggaaacgggtttttttcatgtaaggctagacagaagaattctcagtaacttccttgtgttgtgtgtattcaactcacagagttgaacgatcctttacacagagcagactagaaacactctttttgtggaatttgcaagtggagatttcagcccctttgaggtcaaaggtagaaaaggaaatatcttcgtataaaaactagacagaatgattctcagaaactcctttgtgatgtgtgcgttcaactcacagagtttaacctttcttttcatagagcagttgggaaacactctgtttgtaaagtctgcaagtggatattcagacatccttgaggctttcgttggaaacgggatttcttcatattctgctagaaaggagaattcccagtaacttccttgtgttgtgtgtgttcaactcacagagttgaactttaatttacgcagagcagatttgaaacactctttttgtggaatttgcatttggagatttcaagcgctttgaggccaaaggcagaaaaggaaatatcttcgtataaaaactagacagaatcattctcagaaactgctctgtgatgtgtgcgttcaactctcagagtttaacttttcttttcattcagcagtttggaaacactctgtttgtaaagtctgcaagtggataatttgaccacttagaggccttcgttggaaacgggtttttttcatgtaaggctagacagaagaattctcagtaacttccttgtgttgtgtgtattcaactcacagagttgaacgatcctttacacagagcagaattgaaacactgtttttgtggaatttacaagtggagatttcagccgctttgaggtcaatggtagaaaaggaaatatcttcctatagaaactagacagaatgattctcagaaactcctttgtgatgtgtgcgttcaactcacagagtttaacctttcttttcatagagcagttaggaaacactctctttgtaaagtctgcaagtggatattcagacatctttgaggctttcgttggaaacgggatttcttcatattctgctagacagaagaattctcagtaacttccttgtgttgtgtgtattcaactcacagagttgaactttcattcacacagagcagatttgaaacactctttttatggaatttgcaagtggagatttcaagcgctttgaggccaaaggcagaaaaggaaatatcttcgtttcaaaactagacagaatcattctcagaaactgctctgcgatgtgtgcgttcaactctcagagtttaacttttcttttcattcagcagtttgaaaacactctgtttgtaaagtctgcacgtggatattttgaccacttagaggtcttcgttggaaacgggtttttttcctgtaaggctagacagaagaattcccagtaacttccttgtgttgtgtacattcaactcacagagttgaacgtttccttagacagagcagatttgaaacactctttttgtgcaattggcaagtggtgatttcagccgctttgaggtcaatggtagaaaaggaaatatcttcgtataaaaactagacagaatcattcccacaaactgcgttgtgatgtgttcgttcaactcacagagtttaacctttcttttcatagagcagttaggaaacagtctgtttgtaaattctttaagtggatattctgacatcttgtgaccttcgttggaaacgggatttcttcatattctgctagacataagaattctcagtaacttccttgtgttctgtgtattcaactcacagagttgaaccatcctttacacagagcagacttgaaacactctttttgtggaatttgcaagtggagatttcagccgctttgaggtcaatggtagaaaaggaaatatcttcgtataaagactagacagaatgattctcataaactcctttgtgatgtgtgcgttcaattcacagagtttaacctttcttttcatagagcagttaggaaacactctgtttgtaaagtctgcaagtggatattcagacatccttgaggccttcgttggaaacgggatttcttcatattctgctagacagaagaattctcagaatcttccttgtgttgtgtgtattcaactcacagagttgaacgatcctttacacagagcagacttgaaacactctttttgtggaatttccaagtggagatttcagccgctttgaggtccatggtagaaaaggaaatatcttcgtataaaaactagacagaatgattctcagaaactcctttgtgatgtgtgcgttcaactcacagagtttaacctttctttccatagagcagttaggaaacactctgtttgtaaagtctgcaagtggatattcagacctccttgaggccttcgttggaaacgggatttcttcatattatgctagacacaagaattcccagtaacttccttgtgatgtgtgtgttcaactcacagagttgaactttcatttacacagagcagatttgaaacactctttttgtggaatttgcaagtggagatttcaagcgctttgaggccaaaggccgaaaaggaaatatcttcgtataaaaactacacagaatcattctcagaaactgctctgtgatgtgtgcgttcaactctcagagtttaacttttcttttcattcagcagtttggaaacactctgtttttaaagtctgcacgtggataatttgaccacttagaggccttcgttggaaacgggatttttcatgtaaggctagacagaagaattcccagtaacttccttgtgttgtgtacattcaactcacagagttgaacgttcccttagacagagcagatttgaaacactctttttgtgcaattggcaagtggtgatttcagccgctttgagatcaatggtagaaaaagaaatatcttcgtataaaaactagacagaatcattcgcacaaactgcgttgtgatgtgttcgttcaactcacagagtttaacctttcttttcatagagcagttaggaaacagtctgtttgtcaattctgtaagtggatattctgacatcttgtggccttcgttggaaacgggatttcttcataatctgctagacagaagaattctcagaatcttccttgtgttgtgtgtattcaactcacacagttgaacgattgtttacacagagcagatttgaaacactctttttgtggaatttgcaagtggagatttcagccgctttgaagtcaaaggtagaaaagggaatatcttcctataaaaactagacagaatgattctcagaaactcctttgtgatgtgtgcgttcacctcacagagtttaacctttctgttcatagagcagttaggaaacactctgtttgtaaagtctgcaagtggatattcagacctctttgaggccttcgttggaaacgggatttcttcatattctgctagacagaagaattctcagtaacttccttgtgttgtgtttattcaactgacagagttgaactttcatttagagagagcagatttgaaacactgtttttgtggaatttgcaagtggagatttcaagcactttggggccaaaggcagaaaaggaaatatcttcgtataaaaactagacagaatcattctcagaaactgctctgcgatgtgtgcattcaactctcagagtttaacttttcttttcattcagcagtttggaaacactctgtttgtaaagtctgcacgtggatattttgaccacttacaggccttcgttggaaacgggtttttttcctgtaaggctagacagaagaattcccagtaacttccttgtgttgtgtgcattcaactcacagagttgaacgttcccttagacagagccgatttgaaacactctatttgtgcaatttgcaagtgtagatttcaagcgctttaaggtcaatggcagaaaaggaaatatcttcgtctcaaaactagacagaatgattcccataaactcctttgtgatgtgtgcgttcaacacacagagtttaacctttctgttcatagagcagttaggaaacactctgtttgtaaagtctgtaagtggatattctgacatcttgtggccttcgctggaaacgggatttcttcatattctgctagacagaagaattctcagtaacttccttgtgttgtgtgtattcaactcacagagttgaacgatcctttacacagagcagacttgaaacacactttttgtggaatttgcaagtggagatttcagccgctttgaggtcaatggtagaaaaggaaatatcttcgtataaagactacacagaatgattctcagaaaatcttttgtgatgtgtgcgttcaactcacagagtttaacttttcttctcatagagcagttaggaaacactctgtttgtaaagtgtgcaagtggatattcagacctctttgaggtcttcgttggaaacgggatttcttcatattatgctagacagaagaattcccagtaacttccttgtgttgtgtgtgttcaactcacagagttaaactttgatttacacagagcagatttgaaacactctttttgtggaatttgcaagtggagatttcaagcgctttgaggccaaaggcagaaaaggagatgtcttcgtataaaaactagacagaatcattctcagaaactgctctgcgatgtgtgcgttcaactctcagagtttaacttttcttttcattcagcagtttggaaacactctgtttgtaaagtctgcacgtggacattttgaccatttagaggccttcgttggaaacgggtttttttcttgtaaggctagacagagaattcccagtaacttccttgtgttgtgtgcattcaactcacagagttgaacgttcccttagacagagcagatttgaaacactctatttgtgcaatttgcaagtgtagatttcaagcgctttaaggtcaatggcagaaaaggaaatatcttcgtttcaaaactagacagaatcattcccacaaactgcgttgtgatgtattcgttcaactcacagagtttaacctttctgttcatagagcagttaggaaacactctgtttgtaaagtctgtaagtggatattctgacatcttgtggccttcgttggaaacgggatttcttcatattctgctagacagaagaattctcagtaacttccttgtgttgtgtgtattcaactcacagagttgaacgatcctttacacagagcagacttgaaacactctttttgtggaatttgcaagtggagatttcagccgctttgaggtcaatggtagaaaaggaaatatcttcgtataagaactagacagaatgattctcagaaactcctttatgatgtgtgcattcaactcacagagtttaacctttcttttcatagagcagttaggaaacactctgtttgtaaagtctgcaagtggatattcagacctctttgaggctttcgttggaaacgggatttcttcatattctgctagacagaagaattctcagaaacttcattgtgttgtgtgtattgaactcaaagagttgaacgatcctttacacagtgcagacttgaaacactctttttgtggaatttgcaagtggagatttcagccgctttgaggtcaatggtagaataggaaatatcttcctataggaactagacagagaatcttctcagaaactgctctgcgatgtgtgcgttcaactctcagagtttaacttttcttttcattcagcagtttggaaacactctgtttgtaaagtctgcacgtggataacttgaccacttagaggccttcgttggaaacgggtttttttcatgtaaggctagacagagaattctcagtaacttccttgtgttgtgtgtattcacctcacagagttgaacgatcctttacacagagcagacttgtaacactctttttgtggaatttgcaagtggagatttcagccgctttcaagtcaaaggtagaaaaggaaatatcttcctataaaaactagacagaataattcccacaaactgcgttgtgatgtgttcgttcaactcacagagtttaacctttgttttcatagaggagttaggaaacagtctgtttgtaaattctgtaagtggatattgtgacatcttgtggccttcgttggaaacgggatttcttcatattctgctatacagaagaattctcagtaacttccttgtgttgagtgtattcaactcacagagttgaacgatcctttacacagagcagacttgaaacactctttttgtggaatttgcaagtggagatttcagccgctttgaggtcaatagtagaaaaggaaatatcttcgtagaaaaactaggcagaatgattctcagaaaatcctttgtgatgtgtgtgttcaactcacagagtttaacttttcttttcatagagcagttaggaaacactctgtttgtaaagtctgcaagtggatattcagacctctttgaggccttcgttggaaacgggatttcttcatattatgctagacagaagaattctcagtaacttccttgtgttgtgtgtattcaactgacacagttgaactttcatttagagagagctgatttgaaacactgtttttgtggaatttgcaagtggagatttcaagcgctttggggccaaaggcagaaaaggaaatatcttcgtataaaaactagacagaatcattctcagaaactgctgcgtgatgtgtgcgttcaactctcagagtttaacttttcttttcattcagcgggttggaaacactctgtttgtaaagtctgcacgaggatattttgaccccttagaggccttcgttggaaacgggtttttttcatgtaaggctagacagaagaattcccagtaacttccttgtgttgtgtgcattcaactcacagagttgaacgttcccctagacagagcagatttgaaacactctatttgtgcaatttgcaagtgtagatttcaagcgctttaaggtcaatggcagaaaaggaaatatcttcgtttcaaaactagacagaatcattcccacaaactgcgttgtgatgtgttcgttcaactcacagagtttaacctttctgttcatagagcagttaggaaacactctgtttgtaaagtctgcaagtgggtattcagacctccttgaggacttcgttggaaacgggatttcttcatattctgctagacagaagaattctcagaatcttcccttgtgttgtgtgtattcaactcacagagttgaacgatggtttacacagagcagatttgaaacactcttttggtggaatttgcaagtggagatttcagccgctttgaggtcaatggtagaaaaggaaatatcttcgtataaaaactagacagagtgattctcagaaacttctttgtgatgtgtgcgttcaactcacagagtttaacctttcttttcatagagcagttaggaaacactctgtttgtaaactctgcaagtggatattcagacctctttgaggccttcgttggaaacgggatttcttcatactatgctagacagaagaattcccagtaacttccttgtgttgtgtgtgttcaactcacagagttgaactttcatttacacagagcagatttgaaacactctttttgtggaatttgcaagtggagatttcaagcgctttgaggccaaaggcagaaaaggaaatatcttcgtataaaaactagacagatcattctcagtaaactgctgcgtgatgtgtgcgttcaagtctcagagtttaacttttcttttcattcagcggtttggaaacactctgtttgtaaagactgcacgtggatattttgaccacttagaggccttcgttggaaacgggttttttttcatgtaaggctagacagaagaattctcagtaacttccttgtgttgtgtgtattcaactcacagtgttgaacgatcctttacaaagagcagacttgaaacactctttttgtgaaatttgcaagtggagatttctgccgctttgaggtcaatggtagaataagaaatatcttcctatagaaactagacagaatgattctcagaaactcctttgtgatgtgtgcgttcaactcacacagtttaacctttcttttcatagagcagttaggaaacactctgtttgtaaagtctgcaagtggatatacagacctctttgaggccttcgttggaaaggggatttcttcatatgatgctagacagaagaattcccagtaacttccttgtgttgtgtgtgttcaactcacagagttgaactttcatttacacagagcagatttgaaacactctttttgtggaatttgcaaatggagatttcatgcgctttgaggccaaaggcagaaaaggaattatcttcgtataaaaactagacagaatcattctcagaaactgctctgcgatgtgtgcattcaactctcagagtttaatttttcttttcattcagcagtttggaaacactctctttgtaaagtctgcacgtggatattttgaccacttagaggccttcgttcgaaacgggttttattcttgtaaggctagacagaagaattcgcagtaacttctttgtgttgtgtacattcaactcacagagttgaacgttcccttagacagagcagatttgaaacactctttttgtgcaattggcaagtggagatttcaagcgctttaaggtcaatggcagaaaaggaaatatcttcgtttcaaaactagacagaatcattcccacaaactgcgttgtgatgtgttcgttcaactcacagagtttaacctttcttttcatagagcagttaggaaacagtctgtttgtcaattctgtaagtggatattctgacatcttgtggccttcgttggaaacgggattttttcatattctgctagacagaggaattctcagtaacttcctttttttgtgtgtattcaactcacagagttgaacgatcctttacacagagcagacttgaaacactctttttgtggaatttgcaagtggagatttcagccgctttgaggtcaatggtagaataggaaatatcatcgtagaaaaactagacagaatgattctcagaaactcctttgtgatgtgtgcgttcaactcacagtgtttaacttttcttttcatagaacagttaggaaacactctgtttgtaaagtctgcaagtggatattcagacctctttgaggccttcgttggaaacgggatttcttcatattctgatagacagaagaattctcagtaacttccttgtgttgtgtgtattcaactcacagatttcaacgatcctttacacagagcagacttgaaacactctttttgtggaatttgcaggtggagatttcagccgctttttgttcaatggtagaataggaaatatcttcctatagaaactagacagaatgattctcagaaactcctttgtgatatgtgcgttcaactcacagagtttaacctttcttttcatagagcagttaggaaacactctgtttgtaaagtctgcaagtggatattcagacctctttgaggctttcgttggaaacgggatttcttcatattctgctagacagaagaattctcagtaacttccttgtgttgtgtgtattcaactcacagagttgaacgatcctttacacagagaagacttgaaacactctttttgtggaatttgcaataggagatttcagccgctttgaggtcaatagtagaaaaggaaacatcttcgtagaaaaactagacagaatgattctcagaaactcctttgggatgtgtgcgttcaactcacagagtttaacctttcttttcatagagcagttaggaaacactcagtttgtaaagtctgcaagtggatattaagacctctttgaggccttcgttggaaacgggatttcttcatattctgctagacagaagaattcccagtaacttccttgtgttgtgtgtgttcaagtcacagagttgaactttcatttacacagagaagatttgaaacactctttttgtggaatttgcaagtggagatttcaagcgctttgaggccaaaggcagaaaaggaaataacttcgtttcaaaactagacagaatcattctcagaaactgctctgcgatgtgtgcgttcaactctcagagtttaacttttcttttcattcagcagtttggaaacactctgtttgtaaagtctacacgtggataacttgaccacttagaggccttcgttggaaacgggtttttttcatgtaaggctagacagaagaattcccagtaacttccttgtgttgtgtacattcaactcacagagttgaacgttaccttagacagagcagatttgaaacactctttttgtgcaattggcaaatggagatttcaagcgctttaaggtcaatggcagaaaaggaaatatcgtcgtttcaaaactagacagaatcattcccacaaactgcattgtgatgtgtttgttcaactcacagagtttaacctttctgttcatagagcagttaggaaacactctgtttgtaaagtctgtaagtggatattctgacatcttgtggccttcgttggaaacgggatttcttcatattctgctagacagaagaattctcagtaacttccttgtgttgtgtgtattcaactcacagagttcaacgatcctttacacagagcagacttgaaacactctttttgtggaatttgcaagtggagatttcagccgctttgtggtcaaaggtagaataggaaatatcttcctatagaaactagacagaatgattctcagaaacttctttgtgatgtgtgcgttcaactcacagagtttaacttttcttttcatagagcagttaggaaacactctgtttgtaaactctgcaagtggatattcagacctctttgaggccttcgctggaaacgggatttcttcatactgtgctagacagaagaattctcagtaacttcattgtgttgtgtgtattcaactcacagatttcaacgatcctttacacagagcagacttgaaacactctttttctggtatttgcaagtggagatttcagccgctttgaggtcaatggtagaaaaggaaatatcttcgtataaaaactagacagagtgattctcagaaactcctttgtgatgtctgcgtttaactcacagagtttaaccattcttttcatagagcagttaggaaacactctgtttgtaaagtgtgcaagtggattttcagacctccttgaggccttcgttggaaacgggatttcttcatattatgctagacagaagaattctcagtaacttccttgtgttgtgtgtattcaactcacagagttgaacgatcctttacacagagcagacttgtaacactctttttgtggaattcgcaagtggagatttcagcagatttgaagtcaaaggtagaaaaggaaatatcttcctataaaaactagacagaatgattctcagaaactcctttgtgatgtgtgtgttcaactcacacagtttaacctttcttttcatagagcagttaggaaacactctgtttgtaaagtctgcaagtggatattcagacctctttgaggccttcgttggaaacgggtttttttcatataaggctagacagaagaattctcagtaacttccttgtgttgtgtgtattcaactcacagagttgaatgatcctttacacagagcagacttgaaacactctttttgtggaatttgcaagtggagatttcagccgctttgtggtcaatggtagaaaaggaaatatcttcgtataaagactagacagaatgattctcagaaactcctttgtgatgtgtgcgttgaactcacagagtttaacctttcttttcatagagcagttaggaaacactctgtttgtaaagtctgcaagtggatattcagacctctttgaggccttcgttggaaacgggtttttttcatataaggctagacagaagaattctcagtaacttccttgtgttgtgtgtattctactcacagagttgaacgatcctttacacagagcagacttgaaacactctttttgtggaatttgcaagtggagattttagccgctttgaggtcaatggtagaaaaagaaatatcttcgtataaagactagacagaatgattctcagaaactcctttgtgatgtgtgtgttcaactcacagagtttaacctttcttttcatagagcagttagtaaacactccgtttataaagtctgcaagtggatattcagacccctttgaggccttcgttggaaacggcatttcttcatattatgctagacagaagaattctcagtatcttccttgtgttgtgtctattcaactcacagagttgaacgatcctttacacagagcagacttgaaacacccttttggtggaatttgcaagtggagatttcagccgctttgaggtcaatggtagaataggaaatatcttcctatagaaactagacagaatgattctcagaaactcctttgtgatgtgtgcattcaactcacagagtttaacctttcttttcatagagcagttaggaaacactctgtttgtaaagtctgcaagtggatattcagacctccttgaggccttcgttggaaacgggatttcctcatattctgctagacagaagaattctcagtaactaccttgtgttgtgtgtattcaactcacagagttgaacgatcctttacagagagcagacttgaaacactctttttgtggaatttgcaagttgagatttcagccgctttgaggtcaatggtagaataggaaatatcttcctatagaaactagacagaatgatactcagaaactcctttgtgatgtgtgcgttcaagtcacagagtttaacctttcttttcatagagcagttaggaaacactctgtttgtaaagtctgcaagtggatattcagacctctttgaggccttcgttggaaacgggtttttttcatataaggctagacagaagaattcccagtaacttccttgtgttgtgtgtgttcaactcacagagttgaactttcatttacacagagcagatttgatacactctttttgtggaatttgcaaatggagatttcaagcgctttgaggccaaaggcagaaaaggaaatatcttcgtataaaaactagacagaatcattctcagaaactgctctgcgatgtgtgcgtttaactctcagagtttaacttttcttttcattcagcagtttggaaacactctgtttgtaaaatctgcacgtggataatttgactacttagaggccttcgttggaaactggtttttttcatgtaaggctagacagaagattctcagtaacttccttgtgttgtgtgtattcaactcacagagttgaacgatcctttacacagagcagacttgaaacactctttttgtggaatttgcaagtggagatttcagccgcgttgaggtcaatggtagaaaaggaaatatcttcgtataaaaactagacagaatgattctcagaaactcctttgtgatgtgtgcgttcaactcacagagtttaacttttcttttcatagagcagttaggaaacactctgtttgtaaagtctgcaagtggatatgtcagacctctttgaggccttcgttggaaacgggatttcttcgtattctgctagacagaagaattctcagtaacttccttgtgttgtgtgtaatcaactgacagagttgaactttcatttagagagagcagatttgtaacactgtttttgtggaatttgcaagtggagatttcaagcgctttggggccaaaggcagaaatggaaatatcttcgtataaaaactagacagaatcattctcagaaactgctctgcgatgtgtgcgttcaactctcagagtttaacttttcttttcattcagcagtttggaaacactctgtttgtaaagtctgcacgtggatattttcaccatttagaggccttcgttggaaacgggtttttttcttgtaaggctagacagaagaattcccagtaacttccttgtgttgtgtacattcaactcacagagttgaacgttcccatagacagagcagatttgaaacactctttttgtgcaattggcaagtggagatttcaagtgctttaaggtcaatggcagaaaaggaaatatcttcgtttcaaaactagacagaatcattcccacaaactgcgttgtgatgtgttcgttcaactcacagagtttaacctttctgttcatagagcagttaggaaacactctgtttgtaaagtctacaagtggatattcagacctccttgaggccttcgttggaaacgggatttcttcatattctgctagacagaagaaatctcagaatcttccttgtgttgtgtgtattcaactcacagagttgaacgatcctttacacagagcagacttgaaacactctttttgtggaatttgcaagtggagatttcagccgctttgaggtccatggtagaaaaggaaatatcttcgtataaaaactagacagaatgattctcagaaactcctttgtgatgtgtacgttcaactcacagagtttaacctttcttttcatagagcagttaggaaacactctgtttgtaaagtctgcaagtggatattgagacctctttgaggcgttcgttggaaacgggttttgttcatataaggctagacagaaagaattctcagtaacttccttgtgttgtgtgtattcaactcacagagttgaacgatcctttacacagagcagacttgtaacactctttttgtggaatttgcaagtggagatttcagccgctttgaagtcaaaggtagaaaaggaaatatcttcctataaaaactacacagtaatgattctcagaaactcctttgtgatgtgtgcgttcaactcacagagtttaacctttcttttcatagagcagttaggaaacactctgcttgtaaagtctgcaagtggatattcagccctctttgaggccttcgttggaaacgggtttttttcatataaggctagacagaagaattctcagtaacttcccttgtgttgtgtgtattcaactgacagagttgaactttcatttagagagagcagatttgaaacactgtttttgtggaatttgcaagtggagatttcaagtgctttggggccaaaggcagaaaacgaaatatcttcgtataaaaagtagacagaatcattctcagaaactgctctgcgatgtgtgcgttcaactctccgagttcaacttttcttttcattcagcagtttggaaacactctgtttgtaaagtctgcacgtggataatttgactacttagaggccttcgttggaaacgggtttttttcatgtaaggctagacacaagaattcccagtaacttccttgtgttgtgtacattcaactcacagagttgaacgttcccttagacagagcagatttgaaacactctttttgtgcaattggcaaatggagatttcaagcgctttaaggtcaatggcagaaaaggaaatatcttcgtttgaaaactagacagaatcattcccacaaactgcgttgtgatgtgttcgttcaactcacagagtttaacctttctgttcatagagcagttaggaaaaactctatttgtaaagtctgtaagtggatattctgacatcttgtggccttcgttggaaacgggatttcttcatattctgctagacagaagaattctcacaatcttccttgtgttgtgtgtattcaactcacagagttgaacgatggtttacacagagcagatttgaaacactctttttgtggaatttgcaagtggagatttcagccgctttgaggtcaatggtagaaaaggaaatatcttcgtataaaaactagacagaatgattctgagaaactactttgtgatgtgtgcgttcaactcacagagtttaacttttcttttcatagagcagttaggaaacactctgtttgtaaagcctgcaagtggatattcagacctccttgaggccttcgttggaaacgggatttcttcatattatgctagacagaagaattctcactaacttccttgtgttgtgtgtattcaactcacagagttgaacgatcctttacacagagcagactttaaacactctttttgtggaatttgcaagtggagatttcagccgctttgaggtcaacggtagaaaaggaaatatctccgtataaagactagacagaatgattctcagaaactcctttgtgatgtgtgcgttcaactcacagagtttaacttttcttttcatagagcagttaggaaacactccgtttgtaaagtctgcaagtggatattcagacctctttgaggccttcgttggaaacgggatttcttcatattatgctagacagaagaattcccagtaacttccttgtgttgtgtgtgttcaactcacagagttgaactttcatttacacagagcagatttgaaacactctttttgtggaatttgcaaatggagatttcaagagctttgaggccaaaggcagaaaaggaaatatcttcgtataaaaactagacagaatcattctcagaaactgctctgcgatgtgtgcgttcaactctcagagtttaactttgcttttcattcagcagtttggaaacactctgtttgtaaagtctgcacgtggataatttgaccacttagaggccttccttggaaacgggtttttttcatgtaaggctagacagaagaattctcagtaacttccttgtgctgtgtgtattcaactcacagagttgaacgatcctttacacagagtggacttgaaacactctttttgtggaatttgcaagtggagatttcagccgcgttgaggtcaatggtagaaaaggaaatatcttcgtataaaaactagacagaatgattctcagaaactcctttgtgatgtgtgcgctcaactcacagagtttaaactttcttttcatagagcagttaggaaacactctgtttgtaaagtctgcaagcggatattcagacctctttgaagccttcgttggaaacgggatttcttcatattctgctagacagaagaattcccagtaacttccttgtgttgtgtgtgttcaactcacagagttgaacgatcctttacacagagcagatttgaaacactctttttgtggaatttgcaagtggagatttcaagcgctttgaggccaaaggcagaaaaggaaatatcttcgtagaaaaactagacagaatgattctcagaaccttctttgtgatgtgtgcgttcaactcacagagtttaaactttcttttcatagagcagttaggaaacactctgtttgtaaactctgcaagtggatattcagacctctttgaggccttcgttggaaacgggatttcttcatactatgctagacagaagaattctcagaaacttccttgtgttgtgtgtattcaactcacagagtttaacgatcgtttacacagagcagacttgagacactctttttgtggaatttgtaagtggagatttcagccgctttggggtcaatggtagaaaaggaaatatcttcatgtaaaaactagacagaatcattctcagaaactgctctgtgatgtgtgcgttcaactctcagagtttaacttttctgttcattcagcagtttggaaacactctgtttgtaaagtctgcacgtggataatttgaccacttagaggccttcgttggaaacgggtttttttcatataaggctagacagaagaattctcagtaactttcttgtgttgtgtgtattcaactgacagagttgaactatcatttagagagtgcagatttgaaacactgtttttgtggaatttgtaagtggagacttcaagcgctttggggccaaaggcagaaaaggaaatatcttcgtataaaaactagacagaatcattctcagaaactgctctgcgatgtgtgcgttcaactctcagagtttaagttttcttttcattcagcagtttggaaacactctgtttgtaaagtctgcacgtggataatttgaccacttagaggccttcattggaaacgggtttttttcatgtaaggctagacagaataattctcagtaacttccttgtgttgtgtgtattcaactcacagagttgaacgatcctttacagagagcagacttgaaacactctttttgtggaatttgcaagtggagatttcagccgctttgaggtcaatggtagaaaacgaaatatcttcgtataaagactagacagaatgattctgagaaactcctttgtgatgtgtgcgttcaactcacagagtttaacctttcttttcatagagcagttaggaaacactctctttgtaaagtatgcaagtggatattcagacatccttgaagctttcgttggaaacgggatttcttcatattctgctagaaagaagaattctcagtaacttccttgtgttgtgtgtattcaactcacagagttgaatgatcctttacacagaacagtcttgaaacagtctttttgtggaatttgcaagtggagatttcagccgctttgaggtcaatggtggaataggaaatatcttcctatagaaactagacagaatcattgtcagaaactgctctgtgatgtgtgcgttcaactctcagagtttaacttttcttttcattcagtagtttggaaacactctgtttgtaaagtctgcacgtggatattttgaccacttagaggccttcgatggaaacggggttttttcatttaaggctagacagaagaattcccagtaacttccttgtgttgtgtgcattcaactcacagagatgaacgttcccttagacagagcagatttgaaacactctatttgtgcaatttgcaagtgtagatttcaagggctttaaggtcaatggcagaaaaggaaatatcttcgtttcaaaactagacagaatcattcccacaaactgcgttgtgatgtgttcgttcaactcacagagtttaacctttcttttcatagagcagttaggaaacagtctgtttgtcaattctgtaagtggatattctgatatcttgtggccttcgttggaaacgggatttcttcatattctgctagacagaagaattctcagaatcttccttgtgttgtgcgtattcaactcacagagttgaacgatcctttacacagagcagacttgaaacactctttttgtggaatttgcaagtggagatttcagccgctttgaggtccatggtagaaaaggaaatatcttcgtataaaaactagacagaatgattctcagaaactcctttgtgatgtgtgcgttcaacacacagagtttaacctttcttttcatagagcagttaggaaacactctgtttgtaaagtctgcaagtggatattcagacctccttgaggccttcgttggaaacgggatttcttcatattatgctagacagaagaattctcagtaacttccttttattgtgtgtattcaactcacagagttgaacgatcctttacacagagcagatttgaaacactctttttgtggaatttgcaagtggagatttcagccgctttgaggtcaatggtagaaaaggaaatatcttcgtataaaaattagacagaatgattctcagaaactcctttgtgatgtgtgcgttcaactcacagagtttaacctttcttttcatagagcagttaggaaacactctgtttgtaaagtctgcaagtggatattcagacctctttgaggctttcgttggaaactggatttcttcatattctgctagacagaagaattctcagtaacttccttgtgttgtgtgtattcaactcacagagttgaaagatcctttacagagagcagacttgaaacactctttttgtggaatttgcaagtggagatttcagccgctttgaagtcaatggtagaaaaggaaatatcttcgtataaagactagagagaatgattctcagaaactcctttgtgatgtgtgtgttcaactcacagagtttaacctttcttttcatagagcagttagtaaacactctgtttataaagtctgcaattggatattcagacccctttgaggccttcgttggaaacgggatttcttcatattatgctagacagaagaattcccactaactttccttgtgttgtgtgtgttcaactcacagagttgaactttcatttacacagagcagatttgaaacactctttttgtggaatttgcaagtggagatttcaagcgctgtgaggccaaaggcagaaaaggaagtatgcttcgtataaaaactagacagaatcattctaagaaactgctctgcgatgtgtgtgttcaactctcagagtttaacttttcttttccttcagcagtttggaaacactctgtttgtaaagtctgcacgtggataatttgaccacttagaggccttcgttggaaacgggtttttttcatgtaaggctagacagaagaattcccagtaacttccttgtgttgtgtgcattcaactcacagagttgaacgttcccttagacagagcagatttgaaacactctatttgtgcaatttgcaagtgtagatttcaagcgctttaaggtcaatggcagaaaaggaaatatcttcgtttcaaaactaggcagaatgattctcagaaactcctttgtgatgtgtgcgttcaactcacagagtttaacctttcttttcatagagcagttaggaaacactctgtttgtaaagtctgcaagtggatattcagacctccttgaggcctccgttggaaacgggatttcttaatattctgctagacagaagaattctcagtaacttccttgcgttgtgtgtattcaactcacagagttgaacgatcctttacacagagcagacttgaaacactctttttgtggaatttgcaaggggagatttcagccgctttgaggtcaatagtagaaaaggaaatatcttcgtatagaaactagacagaatgattctcagaaactcctttgtgatgtgtgcgttcaactcacagagtttaacctttcttttcatagagcagttacgaaacactgtgtttttaaactctgcaagtggatattcagacctctttgaggccttcgttggaaacgggtttcttcatactgtgctagacagaagaattctcagaatcttccttgtgttgtgtgtattcaactcacagagttgaacgatcgtttacacagagcagatttgaaacactcatttggtggaatttgcaagtggagatttcagccgctttgaggtcaatggtagaaaaggaaatatcttcgtataacaactagacagaatgattctcagaaactcctttgtgatgtgtgcgttcaactcacagagtttaacctttcttttcatagagcagttaggaaacactctgtttgtaaagtctgcaagtggatgttcagacctctttgaggccttcgttggaaaggggtttttttcatataaggctagacagaataattctcagtaagttccttgttttgtgtgtattcaactcacagagttgaaggatcctttacacagagcaggcttgaaacactctttttgtcgaaattgcaagtggagatttcagccgctttgaggtcaatggtagaataggaaatatcttcctatagaaactagacagaatgattctcagaaacttctttgtgatgtgtgcgttcaactcacagagtttaaacctttcttttcatagagcagttaggaaacactctgtttgtaaactctgcaagtggatattcagacctctttgaggccttctttgcaaacgggatttcttcatactatgctagacagaagaattgtcagtaactttccttgtgttgtgtgtattcaactcacagagttgaatgatcctttacacagagcagacttgaaacactctttatgtggaatttgcaagtggagatttcagccgctttgagttcaatggtagaataggaaatatcttcctatagaaactagacagaatgattctcagaaactcctttgtgatgtgtgcgttcaactcacagagtttaacctttcttttcatagagcagttaggaaacactccgtttgtaaagtctgcaagtggatattcagacctcttagaggccttcgatggaaacgggatttcttcatattctgctagacagaagaattctcagtaacttccttgtgttgtgtgtattgaactcacagagttgaacgatccttttcagagagcagacttgaaacactctttttgtggaatttgcaagtggagatttcagccgctttgaggtcaatggtagaaaaggaaatatcttcgtataaagactagacagaatgattctcagaaactcctttgtgatgtgtgtgtccaactcacagagtttaacctttcttttcatagagcagttaggaaacactctgtttgtaaagtctgcaagaggatattcagacctctttgaggccttcgttggaaacgggttttttccatataaggctagacagaagatttctcagaaacttcgttgtgttgtgtgttttcaaatcacagagttcaacgatcctttacacagagtagacttgaaacactctttttgtggaattggcagtgtggagatttcagccgcttttaggtcaatggtagaaaaggaaatatcttcgtataaaaactagacagaatcattctcagaaactgctgcgtgatgtgttcgttcaactctcagagtttaacttttcttttcattcagcggtttggaaacactctgtttgtaaagtctgcacgtggatattttgaccacttagaggtcttcgttggaaacgggtttttttcatgtaaggctagacagaagaattctcagtaactgccttgtgttgtgtgtattcaactcacagagttgaacgatcctgtacacagagcagacttgaaacactccttttgtggaatttgcaagtggagatttcagccgctttgaggtcaatggtagaataggaaatatcttcctatagaaactagacagaatgattctcagaaactcctttgtgatgtgtgcgttcaactcacagagtttaaccgttcttttcatagagcagttaggaaacactctgtttgtaaagtctgcaagtggatattcagacatctttgaggctttctttggaaacgggatttcttcatattctgctagacagaagaattctcagaaacttccttgtgttgtgtgtattcaactcacagagttgaacgatcctttactcagagcagacttgaaacactccttttgtggaatttgcaagtggagattccagccgctttgaggtcaatggtagaataggaaatatcttcctatggaaactagacagaaatcattctcagaaaactgctctgcgatgtgtgcgttcaactctcagagtttaacttttcttttcattcagcagtttggaaacactctgtttgtaaagtctgcacgtggatattttgaccacttagaggccttcgttggaaacgggtttttttcctgtaaggctagacagaagaattcccagtaacttccttgtgttgtgtacattcaactcacagagttgaacgttcccttagacagagcagatttgaaacactctttttgtgcaattggcaaatggagatttcaagcgctttaagttcaatggcagaaaaggaaatatcttcgtttcaaaactagacagaatcattcccacaaactgcgttgtgatgtgttcgttcaactcacagagtttaacctttctgttcatagagcagttaggaaacactctgtttgtaaagtctgtcagtggatattctgacatcttgtggccttcgttggaaacgggatttcttcatattctgctagacagaagaattctcagtaacttccttgtgttgtgtgtattcaactcacagagttgaacgatcctttacacagagcagacttgtaacactctttttgtggaatttgcaagtggagatttcagccgctttgaggtccatggtagaaaaggaaatatcttcctataaaaactagacagaatgattctcagaaacttctttgtgatgtgtgcgttcaactcacagagtttaacctttcttttcatagagcagttaggaaacactctgtttgtaaactctgcaagtggatattcagacctctttgaggccttcgttggaaacgggatttcttcattctatgctagacagaagaattctcagtaactttccttgtgttgtgtgtattcaactcacagagttgaacgatcctttacacagagcagacttgaaacactctttttctggaatttgcaagcggagatttcagctgcgttgaggtcaatggtagaaaaggaaatatcttcgtataaaaactagacagaatgattctcagaaactcctttgtgatgtgtgcgttcaactcacagagtttaacctttcttttcatagagcagttaggaaacactctgtttgtaaagtctgcaagtggatattcagacctctttgaggccttcgttggaaacgggtttttttcatatacggctagacagaagaattctcagtaacttccttgtgttgtgtgtattcagctgacagagttgaactttcatttagagagagcagatttgaaacactgtttttgtggaatttgcaattggagatttcaagcgctttggggccaaaggcagaaaaggaaatatcttcgtaaaaaactagacagaatgtttctcagaaacttctttgtgatgtgtgcattcaactcacagagtttaacctttcttttcatagagcagttaggaaacactgtgtttgtaaagtctgcaagtggatattcagacctctttgaggccttcgttggaaacgggatttcttcatactgtgctagacagaagaattctcagtaacttccttgtgttgtgtgtattcaactcacagagttgaacgatcctttacacagagcggacaggaaacactctttttctggaatttgcaagcggagatttcagctgcgttgaggtcaatggtagaaaaggaaatatcttcgtataaaaactagacagaatgattctcaggaaactcctttgtgatgtgtgtgttcaactcacagagtttaacctttcttttcatagagcagttaggaatcactctgtttgtaaagtctgcaagtggatattcagacctctttgaggccttcgttggaaacgggtttttttcatataaggctagacagaagaattctcaataacttccttctgttgtgtgtattcaactgacagagttgaactttcatttagagagagcagatttgaaacactgtttttgtggaatttgcaagtggagatttcaagcgctttggggccaaaggaagaaaaggaaatatcttcgtataaaaactagacagaatcattctcagaaactgcagcgtgatgtgtgcgttcaactctcagagtttaacttttcttttcattcagcggtttggaaacactctgtttgtaaagtctgcacgtggatattttgaccacttagaggccttcgttggaaacgggtttttttcatgtaaggctagacagaagaattcccagtaacttccttgtgttgtgtgcattcaactcacagagttgaacgttcccttagacagagcagatttgaaacactctatttgtgcaatttgcaagtgtagatttcaagcgctataaggtcaacggcagaaaaggaaatatcttcgtttcaaaactagacagaatcattcccacaaactgcgttgtgatgtgttcgttcaactcacagagtttaacctttcttttcatagagcagttaggaaacagtctgtttgtaaattctgtaagtggatattctgacatcttgtggccttcgttggaaacgggatttcttcatattctgctaggcagaagaattctcagtaacttccttgtgttgtgtttattcaactcacagagttgaatgatcctttacacagagcagacttgaaacactctttttgtggaatttgcaagtggagatttcaaccgctttgaggtcaatggtagaaaagtaaatatcttcgtataaagactagacagaatgattctcagaaacttctttgtgatgtgtgcgttcaactcacagagtttaacctttcttttcatagagcagttaggaaaccctctgtttgtaaactctgcaagtggatattcagacctgtttgaggccttcgttggaaacgggatttcttcatactatgctagacagaagaattcccagtaacttccttgtgttgtgtgtgttcaactcacagaggtgaactttcatttacacagagcagatttgaaacactctttttgtggaatttgcaagtggagatttcaagcgctttgaggccaaaggcagaaaaggaaatatcttcgtataaaaactagacagaatcattctcagaaactgctctgcgatgtgtgcgttcaactctcagagtttaacttttcttttcattcagcagtttggaaacactctgtttgtaaagtctacacgtggataatttgaccacttagaggccttcgttggaaacgggtttttttcatgtaaggctagacagaagaattctcagtaacttccttgtgttgtgtgtattcaactcacagaggtgaacgatcctttacacagagcagacttgtaacactctttttgtggaatttgcaagtggagatttcagccgctttgaagtcaaaggtagaaaaggaaataacttcctataaaaactagacagaatgattctcataaactcctttgtgatgtgtgcgttcaactcacagagtttaacctttcttttcatagagcagttaggaaacactctgtttgtaaagtctgcaagtggatattcagacccctttgagtccttcgttggaaacgggatttcttcatattctgctagacagaagaattcccagtaacttccttgtgttgtgtgtgttcaactcacagagttgaactttcatttacacagagcagattggaaacactctttttgtggaatttgcaagtggagatttcaagcgctttgaggccaaaggcagaaaaggaaatatctttgtataaaaactagacagaatcattctcagaaactgctctgcgatgtgtgcgttcaactctcagagtttaacttttcttttccttcagcagtttggaaacactctgtttgtaaagtctgcacgtggataacttgaccacttagaggccttcgttggaaacgggtttttttcatgtaaggctagacagaagaattctcagtaacttccttgtgttgtgtgtattcaactcacagagttgaacgatcctttacacagagcagacttgaaacactctttttgtggaatttgcaagtggagatttcagccgctttgaggtcaatggtagaaaaggaaactttcttcgtataaagactagacagaatgattctcataaactcctttgtgatgtgtgcgttcaactcacagagtttaacctttcttttcatagagcagttaggaaacactctgtttgtaaagtctgcaagtggatattcagacatccttgaggccttcgttggaaacgggatttcttcatattctgctagacagaagaattcccagtaacttccttgtgttgtatgtgttcaactcacagagttgaactttcatttacacagagcagatttgaaacactctttttgtggaatttgcaaatggagatttcaagcgctttgaggccaaagacagaaaaggaaatatcttcgtataaaaactagacagaatcattctcagtaaactgctgcgtgatgtgtgcgttcaactctcagagtttaacttttcttttcattcagcggtttggaaacactctgtttgtaaagtctgcacgtggatattttgaccacttagaggccttcgttggaaacgggttttttgcatgtaaggctagacagaagaattcccagtaacttccttgtgttgtgtacattcaactcacagagttgaacgttcccttagacagagcagatttgaaacactctttttgtgcaattggcaaatggagatttcaagcgctttatgttcaatggcagaaaaggaaatatcttcgtttcaaaactagacagaatcattcccacaaactgcgttgtgatgtgttcgttcaactcacagagtttaacctttctgttcatagagcagttaggaaacactctgtttgtaaagtctgtaagtggatattctgacatcttctggccttcgatggaaacgggatttcttcatattctcctagacagaagattctcagaatcttccttgtgttgtgtgtattcaactcacagagttgaacgatcctttacacagagcagacttgaaacactctttttgtggaatttgcaagtggagatttcagccgctttgaggtccatggtagaaaaggaaatatcttcgtataaaaactagacagaatgattctcagaaaatcttttgtgatgtgtgccttcaactcacagagtttaacttttcttctcatagagcagttaggaaacactctgtttgtaaagtctgcaagtggatattcagacctctttgaggtcttcgttggaaacgggatttcttcatattatgctagacagaagaatcctcagtaacttccttgtgttgtgtgtattcaactcacagagttgaacgatcctttacacagagcagacttgaaacactctttttgtggaatttgcaagtggagatttcagccgctttgaggtcaatagtagaaaaggaaatatcttcgtagaaaaactagacagaatgattctcagaaactcctttgtgatgtgtgcgttcaactcacagagtttaacctttctttccatagagcagttaggaaacactctgtttgtaaagtctgcaagtggatattcagacctctttgaggccttcgttggaaacgggttttttccatataaggctagacagaagaattcccagtaacttccttgtgttgtgtgtgttccactcacagagttgaactttcgtttacacagagcagatttgaaacactctttttgtggaatttgcaaatggagatttcaagcgctttgaggccaaaagcagaaaaggaaatatcttcgtataaaaactagacagaatcattctcagaaactgctgcgtgatgtgtgcgttcaactctcagagtttaacttttcttttcattcagcgatttggaaaaactctgtttgtaaagactgcacgtggatattttgaccacttagaggccttcgttggaaacgggttttttttcatgtaaggctagacagaagaattctcagtaacttccttgtgttgtgtgtattcaactcacagagttgaacgatcctttaaacagagcagacttgaaacactctttttgtggaatttgcaattggagatttcagccgctttgaggtcaatagtagaaaaggaaatatcttcgtagaaaaactagacagaatgattctcagaaactcctttgaaatgtgtgcgttcaactcacagagtttaacctttcttttcatagagcagttaggaaacactctgtttgtaaagtctgcaagtggatattcagacctccttgaggccttcgttggaaacgggatttcttcatattatgctagacagaagaattcccagtaacttccttgtgttgtgtgtgttcaactcacagagttgaactttcacttacacagagcagatttgaaacactctttttgtggaatttgcaaatggagatttcaagcgctttgaggccaaaggcagaaaaggaaatatcttcgtataaaaactagacagaatcattctcagaaactgctctgtgatatgtccgttcaactctcagagtttaacttttcttttcattcagcagtttggaaacactctgtttgtaaagtctgcacgtggataatttgaccacttagaggccttcgttggaaacgggtttttttcatgtaaggctagacagaataattctcagtaacttccttgtgttgtgtgtattcaactcacagagttgaaggatcctttacagagagcaggcttgaaacactctttttgtcgaatttgcaagtggagatttcagccgctttgaggtcaatggtagaataggaaatatctttttatagaaactagacagaatgattctcagaaactcctttgtgatgtgtgcgttcaactcacagagtttaacctttcttttcatagagcagttaggaaacactctgtttctaaagtctgcaagtggatattcagacctgtttgaggccttcgttggaaacgggtttttttcatataaggctagagagaagaattcccagtaacttccttgtgttgtgtgtgttcaactcacagagttgaactttccttcacacagagcagatttgaaacactctttttgtggaatttgcaagtggagatttcaagcgctttgaggccaaaggcagaaaaggaaatatcttcgtataaaaactagacagaattattctcagaaactgctctgcgatgtgtgcgttcaactctcagagtttaacttttcttttcattcagcagtttggaaacactctgtttgtaaagtctgcacgtggatattttgaccacttagaggcctttgttggaaacgggttttttcctgtaaggctagacagaagaattcccagtaacttccttgtgttgtgtacattcaactcacagagttgaacgttcccttagacagagcagatttgaaacactctttttgtgcaactggcaagtggagatttcaagcgctttaaggtcaatggcagaaaaggaaatatcttcgtttcaaaactagacagaatcattcccacaaactgcgttgtgatgtgttcgttcaactcacagagtttaacttttctgttcatagagcagttaggaaacactctgtttgtaaagtctgtaagtggatattctgacatcttgtggccttcgttggaaacgggatttcttcatattctgctagacagaagaattctcagaatcttccttgtgttgtgtgtattcaactcacagagttgaacgatggtttacagagagcagatttgaaacactctttttgtggaatttgcaagtggagatttcagctgctttgaggtcaatggtagaaaaggaaatatcttcgtataaaaactagacagaatgattctcagaaactcctttgtgatgtgtgcgttcaactcacaggagtttaacctttcttttcatagagcagttaggaaacactctgtttgtaaagtctgcaagtggatattcagacctccttgaggccttcgttggaaacgggatttcttcctattatgctagacagaagaattctcagtaacttccttgtgttgtgtgtattcaactcacagatttgaacgatcctttacacagagcagacttgaaacactcttgttgtggaatttgcaagtggagatttcagccgctttgaggtcaatggtagaaaaggaaatatcttcctatagaaattagacagaatgattctcagaaactcctctgtgatgtgtgcgttcaactcacagagtttaacctttcttttcatagagcagttaggaaacactctgtttgtaaagtctgcaagtggatattcagacatctttgaggctttctttggaaaagggatttcttcatattctgctatacagaagaattctcagtaacttccttgtgttgtgtgtattcaagtgacagagttgaactttcatttacagagagcagatttgaaacactgtttttgtggaatttgcaagtggagatttcaagcgctttggggccaaaggcagaaaaggaaatatcttcgtataaaaactagacagaatcattctcagaaactgctgcgtgatgtgtgcgttcaactctcagagtttaacttttcttttcattcagcggtttggaaacactctgtttgtaaagtctgcacgtggaaattgtgaccacttagaggccttcgttggaaacgggtttttttcatgtaaggctagacagaagaattcccagtaacttccttgtgttgtgtgcattcaactcacagagttgaacgttcccttagacagagcagatttgaaacactctatttgtgcaatttgcaagtgtagttttcaagctctttaaggtcaacggcagaaaaggaaatatcttggtttcaaaactagacagaatcattcccacaaactgcgttgtgatgtgttcgttcaactcacagagtttaacctttctgttcatagagcagttaggaaacactctgtttgtaaagtctgtaagtggatattcagacatcttgtggccttcgttggaaacgggatttcttcatattctgctagacagaagaattctcagtaacttccttgtgttgtgtgtattcaactcacagagttgaacgatcctttacacagaggagacttgaaacactctttttgtggaatttgcaagtggagatttcagccgctttgaggtcaatggtagaaaaggaaaaatcttcgtatagaaacaagacagaatgattctcagaaactcctttgagatgtgtgtgttcaactcacagagtttaacctttgttttcatagaggagttaggaaacactctgtttgtaaagtctgcaagtggatattcagacctctttgaggccttcgttggaaacgggtttttttcatataaggctagacagaagaattctcagtaacttccttgtcttgtgtgtattcaactcacagagttgaacgatcctctacacagagcagacttgtaacactctttttgtggaatttgcaagtggagatttcagccgctttgaagtcaaaggtagaaaaggaaatatcttcctataaaaactagacagaatgattctcagaaactcctttgtgatgtgtgcgttcaactcacagagtttaacctttcttttcatagagcagttaggaaacactctgtttgtaaagtctgcaagtggatattcagacatccttgaggctttcgttggaaacgggatttcttcatattctgttagaaagaagaattctcagtaacttccttgtgttgtgtgtattcaactgacagagttgaactttcatttagagagagcagatttgaaacactgtttttgtggaatttgcaagtggagatttcaagcgctttggggccaaaggcagaaaaggaaatatctccgtataaaaactagacagaatcattctcagaaactgctctgtgatgtgtgcgttcaactctcagagtttaacatttcttttcattcagcagtttggaaacactctgtttgtaaagtctgcacgtggataatttgaccacttagaggccttcgttggaaacgggtttttttcatgtaaggctagacagaagaattctcagaaacttccttgtgttgtgtgtattcaactcacagagttgaacgatcgtttacacggagcagacttgagacactctttttgtggaatttgcaagtggagatttcagccgctttgagttcaatggtagaataggaaatatcttcatataaaaactagacagaatgattctcagaaactcctttctgatgtgtgcgttcaactcacagagtttaaactttcttttcatagagcagttaggaaacactctgtttgtaaagtctgcaagtggatattcagacctctttgaggccttcgttggaaacgggatttcttcatattatgctagacagaagaattctcagaaaattccttgtgttgtgtgtattcaactcacagagttgaacgatcctttacagagagcagacttgaaacactctttttgtggaatttgcaagtggagatttcagccgctttgaggtcaatggtagaataggaaatatcttcctatagaaacttgacagaatgattctcagaaactactttgtgatgtgtacgttcaactcacagagtttaacctttgttttcatagagcagttaggaaacactctgtttgtaaagtctgcaagtggatattcagacctctttgaggccttcgttggaaacgggtttttttcatataaggctagacagacgaattctcagtaacttccttgtgttgtgtgtattcaactcacagagttgaacgatcctttacacagagcagacttgaaacactctttttgtggaatttgcaagtggagatttcagccgctttgaggtcaatggtagaataggaaatatcttcctatagaaactagacagaatgattctcagaaactcctttgtgctgtgtgcgttcaactcacagagtttaacctttcttttcatagagcagttaggaaactctctgtttgtaaagtctgcaagtggatattcagacatctttgaggctttcgttggaaacgggatttcttcatattctgctagacagaagaattctcagtaactttccttgtgttgtgtgtattcaactcacagagttgaacgatcctttacacagagcggacaggaaacactctttttctggaatttgcaagcggagatttcagctgcgttgaggtcaatggtagaaaaggaaatatcttcgtataaaaactagacagaatgattctcagaaactcctttgtgatgtgtgcgttcaactcacagagtttaacctttcttttcatagagcagttagggaacactctgtttgtaaagtctgcaagtggatattcagaccgctttgaggccttcgttggaaaggggatttcttcatattctgctagacagaagaattctcagtaacttcattgtgttgtgtgtattcaactcacagatttcaacgatcctttacacagagcagacttgaaacactctttttgtggaatttgcaagtggagatttcagcctctttgaggtcaatggtagaataggaaatatcttcctatagaaaccagacagaatgattctcataaactcctttgtgatgtgtgcgttcaactcacagagtttaacctttcttttcatagagcagttaggaaacactctgtttgtaaagtctgcaagtggatattcagacctgcttgaggccttctttggaaaagggatttctgcatattatgctagacagaaggaattctcagtaacttccttgtgttgtgtgtattcaactgacagagttgaactttcatttagagagagcagatttgaaacactgtttttgtggaagttgcaagtggagatttcaagcgctttggggccaaaggcagaaaaggaaatatcttcgtataaaaactagacagaatgattctcacaaactcctttgtgatgtgtgtgttcaactcacagagtttaacctttcttttcatagagcagttagtaaacactctgtttataaagtctgcaagtggatattcagacctccttgaggccttcgttggaaacgggatttcttcatattatgctagacagaagaattcccagtaacttccttgtgttgtgtgcattcaactcacagagttgaacgttcccttagacagagcagatttgaaacactctatttgtgcaatttgcaagtgtagttttcaagctctttaaggtcaacggcagaaaaggaaatatcttcgtttcaaaactagacagaatgattctcagaaactcctttgtgatgtgtgcgttcaactcacagagtttaacctttcttttcatagagcagttaggaaacactctgtttgtaaagtctgcaaatggatattccgacctccttgagggcttcgttggaaacgggatttcttcatattctgctatacagaagaattctcagaaacttcattgtgttgtgtgttttcaactcacagagttcaacgatcctttacacagagtagatttgaaacactctttttgtggaattggcagggtggagatttcagccgctttgcggtcaatggtagaaaaggaaatatcttcgtataaaaactagacagaatgattctcagaaactcctttgtgatgtgtgcgttcaactcacagagtttaacctttcttttcatagagcagttgggaaacactctgtttgtaaagtctgcaagtggatattcagacatccttgaggctttcgttggaaatgggatttcttcatattctgctagaaagaataattctcagtaacttccttttgttgtgtgtattcaactcacagagctgaacgatcctttacagagagcagactttaaacactctttttgtggaatttgcaagtggagatttcagccgctttgaggtcaatgttagaataggaaataacttcctatagaaactagacagaatgattctcagaaactcctttgtgatgtgtgcgttcaactcacagagtttaacttttcttttcatagagcagttaggaaacactgtgtttgtaaagtctgcaagtggatattcagacctctttgaggccttcgttggaaacgggatttcttcatattatgctagacagaagaattctcagtaaattccttgtgttgtgtgtattcaactcacagagttgaacgatcctttacacagagcagacttgaaacactctttttgtggaatttgcaagtggagatttcagccgctttgaggtcaatggtagaataggaaatatcttcctatagaaaatagacagaatgattctcagaaactcctttgtgatgtgtgtgttcaactcacagagtttaacctttcttttcatagagcagttaagaaacactctgtttgtaaagtctgcaagtggatattcagacctccttgaggccttcgttggaaacgggatttcttcatattctgctagacagaagaattcccagtaacttccttgtgttgtgtgtgttcaactcacagagttgaactttcatttacacagagcagatttgaaacactctttttgtggaatttgcaagtggggatttcaagcgctgtgaggccaaaggcagaaaaggaaatatcttcttataaaaactagacagaatcattctcagaaactgctgcgtgatgtgtgcgttcaactctcagagtttaacttttcttttcattcagcggtttggaaacactctgtttgtaaagtctgcacgtggaaattttgaccacttagaggccttcgttggaaacgggattttttcatgtaaggctagacagaagaattcccagtaacttccttgtgttgtgtgcattcaactcacagagttgaacgttcccttagacagagcagatttgaaacactctatttgtgcaatttgcaagtgtagttttcaagctctttaaggtcaacggcagaaaaggaaatatcttcgtttcaaaactagacagaatcattcccacaaactgcgttgtgatgtgttcgttcaactcacagagtttaacctttctgttcatagagcagttaggaaacactctgtttgtaaagtctgtaagtggatattctgacatcttgtggccttcgttggaaacgggatttgttcatattctgctagacagaagaagtctcagtaacttccttgtgttttgtgtattcaactcacagagttgaacgatcctttacacagagcagacttgaaacactctttttgtggaatttgcaactggagatttcagccgctttgaggtcaatggtagaataggaaatatcttcctatagaaactagacagaatgattctcagaaactcctttgtgatgtgtgcgttcaactcacagagtttaacctttcttttcatagagcagttaggaaacactctgtttgtaaagtctgcaagtggatatttagacatctttgtggatttcgttggaaacgggatttcttcatattctgctatacagaagaattctcagaaacttccttgtgttgtgtgtattcaactcacagagttcaacgatagtttacacagagcagacttgaaacactctttttgtgtaatttgcaagtggagatttcagccgcttcgaggtcaatggtagaaaaggaaatatcttcgtataaaaactagacagaatcattctcagaaactgctctgcgatgtgtgcgttcaactctcagagtttaacatttcttttcatttagcagtttggaaacactctgtttgcaaagtctgcacgtggataatttgaccacttagaggccttcgttggaaacgggtttttttcatgtaaggctagacagaagaattcccagtaacttccttgttttgtgtacattcaactcacagagttgaacgttcccttagacagagcagatttgaaacactctttttgtgcaattggcaaatggagatttcaagcgctttaaggtcaatggcagaaaaggaaatatcttcgtttcaaaactagacagaatcattcccacaaactgcgttgtgatgtgttcgttcaactcacagagtttaacctttctgttcatagagcagttaggaaacactctgtttgtaaagtctgtaagtggatattctgacatcttgtggccttcgttggaaacgggatttcttcctattctgctagacagaagaattctcagtaacttccctgtgttgtgtgtattcaactcacagagttgaacgatcctttacagagagcagacttgaaacactctttttgtggaatttgcaagtggagatttcagccgctttgaggtcaatggtagaataggaaatatcttcccatagaaactagacagaatgattcccacaaaatcctttgtgatgtgtgcgttcaactcacagagtttaacctttcttttcatagagcagttagtaaacactctgtttataaagtctgcaagtggatattcagacccctttgaggccttcgttggaaacgggatttcttcatattatgctagacagaagaattctcagtaacttccttctgttgtatgtattcaactgacagagttgaactttcatttagagagagcagatttgaaacactgtttttgtggaatttgcaagtggagatttcaagcgcttcggggccaaaggcagaaaaggaaatatcttcgtataaaaactagacagagaatcattctcagaaactgctctgcgatgtgtgcgttcaactctcagagtttaacttttcttttcattcagcagtttggaaacactctggttgtaaagtctgcacgtggataacttgaccacttagaggccttcgttggaaacgggtttttttcctgtaaggctagacagaagaattcccagtaacttccttgtgttgtgtgcattcaactcacagagttgaacgttcccttagacagagcagatttgaaacactctatttgtgcaatttgcaagtgtagatttcaagcgctttaaggtcaatggcagaaaaggaaatatcatcgtttcaaaactagacagaatcattgccacaaactgcgttgtgatgtgttcgttcaactcacagagtttaacctttctgttcatagagcagttaggaaacactctgtttgtaaagtctgtaagtggatattctgacatcttgtagccttctttggaaacgggatttcttcatattctgctagacagaagaattctcagtaacttccttgtgttgtgtgtattcaactcacagagttgaacgatcctttacacagagcagacttgaaacactctttgtgtggaatttgcaagtggagatttcagccgctttgaggtcaatggtagaataggaaatatcttcgtataaagactagacagaatgattctcagaaactcctttgtgatgtgtgcgttcaactcacagagtttaacttttcttttcatagagcagttaggaaacactctttttgcaaagtctgcaagtggatattcagacctctttgaggccttcgttggaaacgggatttcttcatattatgctagacagaagaattcccagtaacttccttgtgttgtgtgtgttcaactcacagagttgaactttcatttacacagagcagatttgaaacactctttttgtggaatttgcaagtggagatttccagcgctttgaggccaaaggcagaaaaggaaatatcttcgtttcaaaactagacagaatcattctcagaaactgctgcgtgatgtgtgcgttcaactctcagagtttaacttttcttttcattcagcggtttggaaacactctgtttgtaaagtatgcacgtggatattttgaccacttagaggccttcgttggaaacgggttttttgcatgtaaggctagacagaagaattcccagtaacttccttgtgttgtgtgtgttcaactcacagagttgaacgttcccttagacagagcagatttgaaacactctatttgtgcaattggcaagtggtgatttcagccgctttggggtcaatggtagaaaaggaaatatcttcgaataaaaactagacagaatcattcccacaaactgcgttgtgatgtgttcgttcaactcacagagtttaacctttgtgttcatagagcagttaggaaacactctgtttgtcaagtctgtaagtggatattctgacatcttgtggccttcgttggaaacgggatttcttcatattctgctagacagaagaattctcagtaacttccttgtgttgtgtgtattcaactcacagagttgaatgatcctttacacagagcagacttgaaacactctttttgtggaatttggaagtggagatttcagccgctttgagttcaatggtagaataggaaatatcttcctatagaaactagacagaaatgattctcagaaactcctttgtgatgtgtgcgttcaactcacagagtttaacctttgttttcatagagcagttaggaaacactctgtttgtaaagtctgcaagtggatattcagacctccttgaggccttcgttggaaacgggatttcttcatattatgctagacagaagaactcccagtaacttccttgtgttgtgtgtgttcaactcacagagttgaactttcatttacacagagcagatttgaaacactctttttgtggaatttgcaagtggagatttcaagcgcgttgaggccaaaggcagaaaaggaaatatcttcgtttaaaaactagacagaatgattctcagaaactcctttgtgatgtgtgcgttgaactcacagagtttaacctttcttttcatggagcagttaggaaacactctgtttgtaaagtctgcacgtggatacttggacttctttgaggccttcgttggaaacgggtttttttcatgtaaggttaaacagaagaattcccagtaacttccttgtgttgtgtgcattcaactcacagagttgaacgtaccttagacagagcagatttgaaacactctatttgtgcaatttgcaagtgtagatttcaagcgctttaaggtcaatggcagaaaaggaaatatcttcgtttcaaaactagacagaatgattctcagaaacttcattgtgacgtgtgctttcaactcacagagtttaacctttcttttcatagaggagttaggaaacactctgtttgtaaagtctgcaagtggatattcagacctctttgaggccttcgttggaaacgggatttcttcatactgtgctagacagaagaattctcagtaacttccttgtgttgtgtgtattcaactcacagagttgaacgatcctttacacagagcggactttaaacacactttttgtggaatttgcaagtggagatttcagccgcattgaggtcaatggtagaaaaggaaatatcttcgtataaaaactagacagaatgattctcagaaacttctttgtgatgtgtgcgttcaactcacagagtttaacctttcttttcatagagcagttaggaaacactccgtttgtaaagtctgcaagtggatattcagacctctttgaggccttcgttggaaacgggatttcttcatactatgctagacagaagaattcccagtaacttccttgtgttgtgtgtgttcaactcacagagttgaactttcatttacacagagcagatttgaaacactctttttgtggaatttgtaaatggagatttcaagcgctttgaggccaaaggcagaaaaggaaatatcttcgtataaaaactagacagaatcattctcagaaactgctctgtgatgtgtgcgttcaactctcagagtttaacttttcttttcattcagcagtttggaaacactctgtttgtaaagtctccacgtggatatttggacttgtttgaggccttcgttggaaaagtgtttttttcatgtaaggctagacagtagaattcccagtaacttccttgcgttgtgtacattcaactcacagagttgaacgttcccttagacagagcagatttgaaacactctttttgtgcaattggcaagtggagatttcaagcgctttaaggtcaatggcagaaaaggaaatatcttcgtttcaaaactagacagaatcattcccacaaactgcgttgtgatgtgttcgctcaactcacagagtttaacctttctgttcatagagcagttaggaaacactctgtttgtaaagtctgtaagtggatattctgacatcttgtggccttcgttggaaacgggatttcttcctattctgctagacagaagaattctcagtaacttccttgtgttgtgagtattcaactcacagagttgaacgatcctttacacagagcggacttgaaacactcgttttgtggaatttgcaagtggagatttcagccgctttgaggtcaatggtagaaaaggaaatatcttcgtataaaaactagacagaattattctcagaaactcctttgtgatgtgtgcgttcaactcacagagttcaacctttcttttcatagagcagttgggaaacactctgtttgtaaagtctgcaagtggatattcagacttctttgaggccttcgttggaagcgggatttcttcatattctgctagacagagtaattctcagtaacttccttgtgttgtgtgtattcaactgacagagttgaactttcatttagagagagcagatttgaaacactgtttttgtggaatttgcaagtggagatttcaagcgctttcgggccaaaggcagaaaaggaaatatcttcgtataaaaactagacagaatcattctcagaaactgctctgcgatgtgtgcgttcaactctcagagttcaacttttcttttcattcagcagtttggaaacactctgtttgtaaagtctgcacgtggataatttgaccacttagagaccttcgttggaaacgggtttttttcatgtaaggctagacagaagaattcccactaacttccttgtgttgtgtgcattcaactcacagagttgaacgttcccttagacagagcagatttgaaacagcctatttgtgcaatttgcaagtgtagatttcaagcgctttaaggtcaacggctgaaaaggaaatatcttcctttcaaaactagacagaatcattcccacaaactgcgttgtgatgtcttcgttcaactcacagagtttaacctttcttttcatagagcagttaggaaacagtctgtttgtaaattctgtaagtggatattctgacatcttgtggccttcgttggaaacgggatttcttcatattctgctagacagaagaattctcagtaacttccttgtgttgtgtgtattcaactcacagagttgaactatcctttacacagagcagacttgaaccaaactttttgtggaatttgcaagtggagatttcagccgctttgaggtcaatggtagaataggaattatcttcctatagaaactagacagaatgattctcagaaactcctttgtgatgtgtgcgttcaactcatagagtttatcctttcttttcatagagcagttaggaaacactctgtttgtaaagtctgcaagtggatattcagacatccttgaggctttcgttggaaacgggatttcttcatattctgctagaaagaagaattctcagcaacttccttgtgttgtgtgtattcaactcacagagttgaacgatcctttacacagagcagacttgaaacactctttttgtggaatttgcaagtggagatttcagccgctttgaggtcaatggtagaataggaaatatcttcctaaagaaactagacagaatgattctcagaaactcctttgtgatgtgtgcgttcaactcacagagtttaacctttcttttcatagagcagttaggaaacactctgtttgtaaagtctgcaagtggatattcagacctccttgaggccttcgttggaaacgggatttcttcatattctgctagaaaaaagaattctcagtaacttccttgtgttgtgtttattcaaatcacagagttgaatgatcctttacacagagcagacttgaaacactctttttgtggaatttgcaagtggagatttcagccgctttgtggtcaatggtagaaaaggaaatatcttcgtataaagactagacagaatgattctcagaaactcctttgtgatgtgtgcgttcaactcacagtgtttaacctttcttttcatagagcagttgggaaacactctgtttgtaaagtctgcaagtggatattcaaacttctttgaggccttcgttggaagcgggatttcttcatattctgctagacggaagaattctcagtaacttccttgtgttgtgtgtattcaactctcagagttgaacgatcctttacagagagcagacttgaaacactctttttgtggaatttgcaagtggagatttcagccgctttgaggtcaatggtagaataggaaatatcttcctatagaaactagacagaatgattctcagaaactcctttgtgatgtgtgcgttcaactcacagagtttaccctttcttttcatagagcagttgggaaacactctgtttgtaaagtctgcaagtggatattcagacctccttgaggctttcgttggaaacgggatttcttcatattctgctagaaagaataattctcagtaacttccttgtgttgtgtgtattcaactcacagagttgaacgatcctttacagagagcagacttgaaacactctttttgttgaatttgcaagtggagatttcagccgctttgaggtcaatggtagaaaaggaaactatcttcgtataaagactagacagaatgattctcagaaactcctttgtgatgtgtgcgttcaactcacagagtttaacctttcttttcatagagcagttgggaaacactctgtttgtaaagtctgcaagtggatattcagacattcttgaggctttcgttggaaacgggatttcttcatattctgctagaaagaagaattatcagtaacttccttgtgttgtgtgtattcaactcacagagttgaacgatcctttacacagagcagtcttgaaacactcttgttgtggaatttgcaagtggagatttcagccgctttgaggtcaatggtagaaaaggaaatatcttcgtataaaaactagacagaatgattctcagaaactcctttgtgatgtgtgcagttcaacacacagagtttaacctttcttttcatagagcagttagggaacactctgtttgtaaagtctgcaagtggatattcagacctctttgaggccgtcgttggaaacgggatttcttcatattatgctagacagaagaattctcagtaacttccttgtgttgtgcgtattcaactcacagagttgaacgatcctttacacagagcagacttgaaacactctttttgcggaatttgcaactggagatttcagccgctttgaggtcaatggtagaataggaaatatcttcctatagaaattagacagaatgattctcagaaactcgtttgtgatgtgtgcgttcaactcacagagtttaacctttcttttcatagagcagttaggaaacactctgtttgtaaagtctgcaagtggatattcagtcctctttgaggccttcgttggaaacggggttttttcatataaggctagacagaagaattctcagtaactttccttgtgttgtgtgtattcaactcacacagttgaacgatcctttacacagagcagacttgtaacactctttttgtggaatttgaaagtggagatttcagccgctttgaagtcaaaggtagaaaaggaaatatcttcctataaaaactagacagaatgattctcagaaactcctttgtgatgtgtgtgttcaacgcacagagtttaacctttcttttcatagagcagttagtaaacactctgtttataaagtctgcaagtggatattcagacccctttgaggccttcgttggaaacgggatttcttcatattatgctagacagaagaattctcagtaacttcctcgtgttgtgtgtattcaactcacagagttgaatgatcctttacacagagcagacttgaaacactctttttgtggaatttgcaaatggagatttcagccgctttgaggtcaatggttgaaaaggaaatatcttcaaataaaaactagacagaatgattctcagaaactcctttgtgatgtgtgcgttcaactcacagagtttaacctttcttttcatagagcagttaggaaacactctgcttgtaaagtctgcaagtggatattcagccctctttgaggccttcgttggaaacgggtttttttcatataaggctagacgagaagaattcccagtaacttcccttgtgttgtgtgtgttcaactcacagagttgaactttcatttacacagagcagatttgaaacactctttttgtggaatttgcaagtggagatttcaagcgctttgaggccaaaggcagaaaaggaaatatcttcgtataaaaacttgacagaatcattctcagaaactgctctgcgatgtgtgcgttcaactctcagagtttaacttttcttttcattcagcagtttggaaacactctgtttgtaacgtctacacgtgaataatttgaccacttagaggccttcgttggaaacgggtttctttcatgtaaggctagacagaagaattcccagtaacttccttgtgttgtgtgcattcaactcacagagttgaacgttccctagacggagcagatttgaaacactctatttgtgcaatttgcaagtgtagatttcaagcgctttaaggtcaatggcagaaaagggaatatcttcgtttcaaaactagacagaatgattctcagaaactcctttgtgatgtgtgcgttcaactcacagagtttaacctttctgttcatagagctgttaggaaacactctgtttgtaaagtctgcaagtggatattcagatctccttgaggccttcgttggaaacgggatttcttcatattctgctagacagaagaattctcagtaacttccttgtgttgtgtgtattcaactcacagagttgaatgatcctttacacagaacagtcttgaaacactctttttctggaatttgcaagtggagatttcagccgctttgaggtcaatggtagaataggaaatatcttcctatagaaactagacagaatgattctcagaaactcctttgtgatgtgtgcgttcaactcacagagtttaacctttcttttcatagagcagttaggaaacaatctgtttgtaaagtctgcaagtggatattcagacatctttgaggctttcgttggaaacgggatttcttcatattctgctagacagcagaattctcagtaacttccttgtgttgtgtgtattcaactcacagagttgaacgaacctttacacagagcagacttgaaacactctttttgtggaatttgcaaggggagatttcagccgctttgaggtcaatagtagaaaaggaaatatcttcatatagaaactagacataatgattctcagaaactcctttgtgatgtgtgcgttcaactcacagagtttaacctttcttttcatagagcagttaggaaacactctgtttgtaaagtctgcaagtggatattcagacctccttggggccttcgttggaaacgggatttcttcatattatgctagacagaagaattctcagtaacttccttgtgttgtgtgtattcaactcacagagttgaacgatcctttacacagagccgacttgaaacactctttttgtggaatttgcaagtggagatttcagccgctttgaggtcaatggtagaaaaggaaatatcttcgtataaagactagacagaatgattctcagaaactcctttgtgatgtgtgcgttcaactcacagagtttaacctttcttttcatagagcagttaggaaacactctgtttgtaaagtctgcaagtggatattcagacctccttgaggccttccatggaagcgggatttcttcatgttcagctagacagaagaattctcagtaacttccttgtgttgtgtgtattcaactcacagagttgaacgatcctttacacagagcagacttgaaacactctttgtggaatttgcaattggagatttcagccgcgttgaggtcaatggtagaaaaggaaatatcttcgtataaaaactagacagaatgattctcagaaactcctttgtgatgtgtgtgttcaactcacagagtttaacctttcttttcatagagcagttaggaaacactctgtttgtaaagtctgcaagtggatattcagacctcctagaggccttcgttggaaacgggatttcttcatattctgctagtcagaagaattctcagtaacttccttgtgttgtgtgtattcaactcacagagttgaatgatccttgacacagagcagacttgaaacactctttttgtggaatttgcaagtggagatttcagccgctttgaggtcaatggtagaaaaggaaatatcttcatataaaaattagacagaaggattctcagaaactcctttgtgatgtgtgcgttcaactcacagagtttaacctttcttttaatagagcagttaggaaacactctgtttgtaaagtctgcaagtggatattcagacctctttgaggccttcgttggaaacgggtttttttcatataaggctggacagaagaattcccagtaacttccttgtgttgtgtgcattcaactcacagagttgaacgttcccttagacagagcagatttgaaacactctatttgtgcaatttgcaagtgtagatttcaagcactataaggtcaatggcagaaaaggaaatatcttcgtttcaaaactagacagaatcattcccacaaactgcgttgtgatgtgttcgttcaactcacagagtttaaccattctattcatagagcagttaggaaacactctgtttgtaaagtctgtaagtggatattctgacatcttgtggccttcgttggaaacgggatttcttcatattctgctagacagaagaattctcagcaacttccttgtgttgtgtgtattcaactcacagagttgaacgatcctttacacagagcagaattgaaacactgtttttgtggaatttgcaagtggagatttctgccgctttgaggtcaatggcagaaaaggaaatatcttcctatagaaactagacagaatgattctcagaaactcctttgtgatgtgtgcgttcaactcacagagtttaacctttcttttcatagagcagttaggaaacactctgtttgtaaagtctgcaagtggatatttagacctctctgaggccttcgttggaaacgggatttcttcatattctgctagacagaagaattcccagtaacttccttgtgttgtgtgtgttcaactcacagagttgaaatttcatttaaacagagcagatttgaaacactctttttgtggaatttgcaagtggagatttcaagcgctttgaggccaaaggcagaaaaggaaatatcttcctataaaaactagacagaatcatgatcagaaactgctctgcgatgtgtgcgttcaactctcagagtttaacttttcttttcattcagcagtttggaaacactctgtttgtaaagtctgcacgtggataatttgaccacttagaggccttcgttggaaacaggtttttttcatgtaaggctagacagaagaattcccagtaacttccttgtgttgcgtacattcaactcacaaagttgaacgttcccttagacagagcagatttgaaacactctttttgtgcaattggcaagtggagatttcaagcgctttaaggtcaatggcagaaaaggaaatatcttcgtttcaaaactagacagaatcattcccacaaactgcgttgtgatgtgttcgttcaactcacagagtttaaactttcttttcatagagcagttaggaaacagtctgtttgtaaattctgtacgtggatattctgacatcttgtggccttcgttggaaacgggatttcttcatattctgctagacagaagaattctcagtaacttccttgtgttgtgtgtattcaactcacagagttgaacgatcgtttacacagagcagacttgaaacactctttttgtggaatttgcaagtggagatttcagccgctttgaggtcaatggtagaaaaggaattatcttcgtataaaaactagacagaatggttctcagaaactcctttgtgatgtgtgcgtttaactcacagagtttaacctttcttttcatagagcagttaggaaacactctgtttgtaaagtctacaagtggatattcagacctctttgaggccttcgttggaaacgggtttttttcatataaggctagacagaagaattctcagtaacttccttgtgttgtgtgtattcaactcacagagttgaacgatcctttacacagagcagacttgaaacactctttttgtggaatttgcaagtggagatttcagccgctttgaggtcaatggtagaaaagtaaatatcttcgtataaaaactagacagaatgattctcagaaactcctttgtgatgtgtgcgttcaactcacagagtttaaccattcttttcatagagcagttaggaaacactctgtttgtaaagtctgcaagtggatattcagacctccttgaggccttcgttggaaacgggatttcttcctattatgctagacagaagaattctcagtaacttccttgtgttgtgtgtattcaactcacagagttgaacgatcctttacacagagcagagttgaaacactctttttgtggaatttgcaagtggagatttcagccgctttgaggtcaatagcagaaaaggaaatatcttcgtagaaaaactagacagaatgattctcagaaactcctttgtgatgtgtgcgttcaactcaaagagtttaacctttcttttcgtagagcagttaggaaacactctctttgtaaagtctgcaagtggatattcagacctctttgaggcctacgttggaaacgggatttcttcatattatgatagacagaagaattctcagaaacttccttgtgttgtgtgcattcaactcacagagttgaacgatcctttacacagagcagattagaaacattctttttgtggaatttgcaagcggagatttcagccgctttgaggtccatggtagaaaaggaaatatcttcgtataaaaactagacagaatgattctcagaaacttcattgtgatgtgtgcgttcaactcacagagtttaacctttcttttcatagagcagttaggaaacactctgtttgtaaactctgcaagtggatattcagacctctttgaggccttctttggaaacgggatttcttcatactgtgctagacagaagaattctcagtaacttccttgtgttgtgtgtattcacctcacagagttgaacgatcctttacacagagcagacttgaaacactctttttgtggaatttgcaagtggagatttcagccgctttgaggtcaatggtagaataggaaatatcttcctatagaaactagacagaacgattctcagaaactcctttgtgatgtgtgcgttcaactcacagagtttaacctttcttttcatagagcagttaggaaacactctgtttgtaaaggctgcaagtggatattcagacctctttgaggccttcgttggaaacgggatttcttcctattctgctagacagaagaattctcagtaacttccttgtgttgtgtgtattgaactcacagagttgaacgatcctttacacagagcagacttgaaacactctttttgtggaatttgcaagtggagatttcagccgctttgaggtcaatagtagaaaaggaaatatcttcgtataaagactagacagaatgattctgagaaactcctttgtgatgtgtgcgttcaactcacacactttaacctttcttttcatagagcaattaggaaacactctgtttgtaaagtctgcaagtggatattcagacctctttgaggccttcgttggaagcgggatttcttcatattctgctagacagaagaattcccagtaacttccttgtgttgtgtgtgttcaactcacagagttgaactttcatttacacagagcagatttgaaacactctttttgtggaatttgcaaatggagatttcaagcgctttgaggaaaaaggcagaaaaggaaatgtcttcgtttcaaaactagacagaatgattctcagaaactcctttgtgatgtgtgcgttcaactcacagagtttaacttttcttttcatagagcagttaggaaacactctgtttgtaaagtctgcaagtggatattcagacctccttgaggccttctttggaaacgggatttcttcatattctgctagacagaagaattctcactaacttccttgtgttgtgtgtattcaactcacagagttgaacgatcctttacaaagagcagacttgaaacactctttttgtagaatttgcaagtgtagatttcagccgctttgaggtcaatggtagaaaaggaaatatcttcgtataaagactagacagaatgattctcagaaactcctttgtgatgtgtgcgttcaactcacagagtttaacttttcttttcatagagcagttaggaaacactctgtttgtaaagtctgcaagtggatattcagacctccttgaggccttcgttggaaacaggatttcttcatattctgctagacggaagaattctcagtaaattccttgtgttgtgtgtattcaactcacagagttgaacgatcctttacaaagagcagacttgaaacactctttttgtggaatttgcaagtggagatttcagccgctttgaggtcagtagtagaaaaggaaatatcttcgtagaaaaactagacagaaatgattctcagaaactcctttgtgatgtgtgtgttcaactcacagagtttaacctttcttttcatagagcagttaggaaacactctgtttctaaagtctgcaagtggatattcagacctctttgaggccttcgttggaaacgggtttttttcatataaggctagacagaagaattccctgtaacttccttgtgttgtgtgtattcaactgacagagttgaactttcatttagacagagcagatttgaaacactctttttgtggaatttacaagtggagatttcaagcgctttgaggccaaaggcagaaaaggaaatatcttcgtataaaaactagacagaatcattctcagaaactcctttgtgatgtgtgcgttcaactctcagagtttaacttttcttttcattcagcggtttggaaacactctgtttgtaaagtctgcacgtggaaattttgaccacttagaggccttcgttggaaacgggtttttttcatgtaaggctagacagaagaattcccagtaacttccttgtgttgtgtgcattcaactcacagagttgaacgttcccttagacagagcagatttgaaacactctatttgtgcaatttccaagtgtagatttcaagcgctttaaggtcaatggcagaaaaggaaatatcttcgtttcaaaactagacagaatcattcccacaaactgcgttgtgatgtgttcgttcatctcacagagtttaacctttcttttcatagagcagttaggaaacagtctgtttgtaaattctgtaagtggatattctgacatcttgtggccttcgttggaaacgggatttcttcatattctgctagacagaagaattctcagtaacttccttgtgttgtgtgtattcaactcacagagttgaacgatcctttacacagagcagacttgaaacactctttttgtggaatttgcaagtggagatttcagccgctttgaggtcaatagtagaaaaggaaatattttcgtagaaaaactagacagaatgattctcagaaactcctttgtgatgtgtgcgttccactcacagagtttaacctttcttttcatagagcagttaggaaacactctgtttgtaaagtctgcacctggatatttggacttctttgaggccttcgttggaaacgggtttttttcatgaaaggctagacagaagaattcccagtaacttccttgtgttgtgtgtgttcaactcacagagttgaactttcatttacacagagcagatttgaaacactctttttgtggaatttgcaaatggagatttcaagcgctttgaggaaaaaggcagaaaagggaatatcttcgtataaaaactagacagaatcattctcagaaagtgctctgcgatgtgtgcgttcaactctcagagtttaacttttcttttcattcagcagtttggaaacactctgtttgtaaagtctgcacgtggataatttgaccacttagaggccttcgttggaaacgggtttttttcatgtaaggctagacagaagaattcccagtaacttccttgcgttgtgtacattcaactcacagagttgaacgttcccttagacagagcagatttgaaacactctttttgtgcaattggcaagtggagatttcaagcgctttaaggtcaatggcagaaaaggaaatatcttcgtttcaaaactagacagaatcattcccacaaactgcgttgtgatgtgttcgttcaactcacagagtttaacctttcttttcatagagtagttaggaaacagtctgtttgtaaattctgtacgtggatattctgacatcttgtggccttcgttggaaacgggatttcttcatgttctgctagacagaagaattctgagaatcttccttgtgttgtgtgtattcaactcacagagttgaacgatggtttacacagagcagatttgaaacactctttttgtggaatttgcaagtggagatttcagccgctttgaggtcaatggtagaaaaggaaatatcttcgtataaaaactagacagaatgattctcataaactcctttgtgatgtgtgcgttcaaatcacagagtttaacttttcttttcatagagcagttaggaaacactctgtttgtaaagtctgcaagtggatattcagacctctttgaggccttcgttggaaacgggatttctacatattatgctagacagaagaattcccagtaacttccttgtgttgtgtgtgttcaactcacagagttgaactttcatttacacagagcagatttgaaacactctttttgtggaatttgcaagtggagatttcaagcgctttgaggccaaaggcagaaaaggaaatatcttcgtataaaaactagagagaatcattctcagaaactgctctgtgatgtgtgcgttcaactctccgagtttaacttttcttttcattcagcagtttggaaacactctgtttgtaaagtctgcacgtggataatttgaccacttagaggccttgtttggaaacggattttttttcatgtaaggctagacagaagaattcccagtaacttccttgtgttgtgtacattcaactcacagagttgaacgttcccttagacagagcagatttgaaacactctttttgtgcaattggcaagtggtgatttcagccgctttgaggtcaatggtagaaaaggaaatatcttcgtataaaaactagacagaatcattcccacaaactgcgttgtgatgcgttcgttcaactcacagagtttaacctttctgttcatagagcagttaggaaacactctgtttgtaaagtctgtaagtggatattctgacatcttgtggccttcgttggaaacgggatttcttcatattctgctagacagaagaattctcagaatcttccttcagttgtgtgtattcaacacacagagttgaacgatggtttacacagagcagatctgaaacactttttgtggaatttggaagtggagatttcagctgctttgaggtcaatggcagaaaaggaaatatcttcgtataaaaactagacagaatgattctcagaaactcctttgtgatgtgtgcgttcaactcacagagtttaacctttcttttcatagagcagttaggaaacactctgtttgtacagtctgcaagtggatattctgacctccttgaggccttcgttggaaaagggatttcttcatattctgctagacagaagaattcccagtaacttccttgtgttgtgtgtgttcaactcacagagttgaactttcatttacacagagcagatttgaaacactctttttgtggaatttgcaagtggagatttcaagcgctttgaggccaaaggcagaaaaggaaatatcttcgtataaaaactagacacaatcattctcagaaactgctctgtgatgtgtgcgttcaactctcagagtttaacttttcttttcattcagcagtttggaaacactctgtttgtaaagtctgcacgtggataatttgaccacttagaggccttcgttggaaacgggtttttttcatgtaaggctagacagaagaattcccagtaacttccttgtgttgtgtacattcaactcacagagttgaacgttcccgtagacagagcagatttgaaacactctttttgtgcaattggcaagtggagatttcaagcgctttaaggtcaatggcagaaaaggaaatatcttcgtttcaaaactagacagaatcattcccacaaactgcgttgtgatgtgttcgttcaactcacagagtttaacctttctgttcatagagcagttaggaaacactctgtttgtaaggtctgcaagtggatattcagacctcctagaggccttcgttggaaacgggatttcttcatattctgctagacagaagaattcccagtaacttccttgtgttgtgtgtgttcaactcacagagttgaactttcatttacacagagcagatttgaaacactctttttgtggaatttgcaagtggagatttcagctgctttgaggtccatggtagaaaaggaaatatcttcgtataaaaactagacagaatgattctgagaaactcctttctgatgtgtgcgttcaactcacagagtttaacctttcttttcatagagcagttaggaaacactctgttggtaaagtctgcaagtggatattcagacctccttgaggccttcgttggaaacgggatttcttcatattatgctagacagaagaattctcagtaacttccttgtgttgtgtgtattcaactgacagagttgaactttcatttagagagagcagatttgaaacactgtttttgtggaatttgcaagtggagatttcaagcgctttggggccaaaggcagaaaaggaaatatcttcatataaaaactagacagaatcattctcagaaactgctctgtgatgtgtgcgttcaactctcagagtttaacttttctcttcattcagcagtttggaaacactctgtttgtaaagtctgcacgtggataatttgaccacttagaggccttcgttggaaacgggtttttttcatgtaaggctagacagaagaattcccagtaacttccttgtgttgtgtacattcaactcacagagttgaacgttcccttagacagagcagatttgaaacactctttttgtgcaattggcaagtggtgatttcagccgctttgaggtcaatggtagaaaaggaaatatcttcgtataaaaactagacagaatgattctcagaaacttcactgtgacgtgtgcgttcaactcacagagtttaacctttcttttcatagagcagttaggaaacactctgtttgtaaactctgcaagtggatattcagacctctttgaggccttcgttggaaacgggatttcttcatactgtgctagacagaagaattctcagtaacttccttgtgttgtgtgtattcaactcactgagttgaacgatcctttacacagaacatactagaaacactcttcttgtggaatttgcaagtggagatttcagccgctttgaggtcaatggtagaataggaaatatcttcgtataaaaattagatagaatgattctcagaaactcctttgtgatgtgtgtgttcaactcacacagtttaacctttcttttcatagagcagttagtaaacactctgtttataaagtctgcaagtggatattcagacccctttgaggccttcgttggaaacggggtttcttcatattctgctagacagaagaattcccagtaacttccttgtgttgtgtgtgttcaactcacagagttgaactttcatttagacagagcagatttgaaacactctttttgtggaatttgcaaatggagatttcaagcgctttgaggccaaaggcagaaaaggaaatatcttcgtataaaaactagacagaatcattctcagaaactgctctgcgatgtgtgcgttcaactctcagagtttaactttgcttttcattcagcagtttggaaacactctgtttgtaaagtctgcacgtggataatttgaccacttagaggccttcgttggaaacgggtttttttcatgtaaggctagacagaagaattcccagtaacttctatgtgttgtgtgcattcaactcacagagatgaatgttcccttagacagagcagatttgaaacactctatttgtgcaatttgcaagtgtagatttcaagcgctttaaggtcaatggcagaaaaggaaatatcttcgtttcaaaactagacagaataattcccacaaactgcgttgtgatgtgttcgttcaactcacagagtttaacctttcttttcatagagcagttaggaaacactctgttggtaaattctgtaagtggatattctgacatcttgtggccttcgttggaaacgggatttcttcatattctgctagacagaagaattctcagtaacttccttgtgttgtgtgtattcaactcacagagttgaacgatcctttacagagagcagacttgaaacagtctttttgtggaatttgcaaatggagatttcagccgctttgaggtcaatggtagaaaaggaaatatcttcgtataaagactagacagaatgattctcagaaactcctttgtgatgtgtgcagttcaactcacagagtttaacctttcttttcatagagcagttaggaaacactctgtttgtaaagtctccaagtggatattcagacctctttgaggccttcgttggaaacgggtttttttcatataaggctagacagaagaattctcagtaacttccttgtcttgtgtgtattcaactcacagagttgaacgatactttacacagagcagacttgaaacccaccttttgtggaatttgcaagtggagatttcagccgctttgaggtcaatggtagaatacgaaatatcttcctatagaaactagacagaatgattctcagaaactcctttgtgatgtgtgcgttcaactcacagagtttaacctttcttttcatagagcagttaggaaacactctgtttgtaaagtctgcaagtggatattcagagctccttgaggccttcgttggaaatgggatttcttcatattatgctagacagaagaattctcagtaacttccttgtgttgtgtgtattcaactgacagagttgaactttcatttagagagagcagatttgaaacactgtttttgtggaatttgcaagtggagatttcaagcgctttggggccaaaggcagaaaaggaaatatcttcgtataaatactagacagaatcattctcagaaactgctgcgtgatgtgtgcgttcaactctcagagtttaacttttcttttcattcagcggttttggaaacactctgtttgtaaagtctgcacgtggaaattttgaccacttagaggccttcgttggaaacgggtttttttcatgtaaggctagacagaagaattcccagtaacttccttgtgttgtgtacattcaactcacagagttgaacgttcccttagacagagcagatttgaaacactttttttgtgcaattggcaagtggagatttcaagcgctttaaggtcaatggcagaaaaggaaatatcttcgtttcaaaactagacagaatcattcccacaaactgcgttgtgatgtgttcgttcaactcacagagtttaacctttccgttcatagaccagttaggaaacactctgtttgtaaagtctgtaagtggatattctgacatcttgtggccttcgttggaaacgggatttcttcatattctgctagacagaagaattctcagaaacttccttgtgttgtgtgttttcaactcacagagttcaacgatcctttacacagaggagacttgaaacactctttttgtggaatttgcaagtggagatttcagccgctttgaggtcaatggtagaataggaaatatcttcctatagaaactagacagaatgattctcagaaacttctttgtgatgtgtgtgttcaactcacagagtttaacctttcttttcatagagcagttaggaaacactctgtttgtaaactctgcaagtggatactcagacctctttgaggccttcgttggaaacgggatttcttcatactatgctagacagaagaattctcagtaacttcccttgtgttgtgtgtattcaactgacagagttgaactttcatttagagagagcagatttgaaacactgtttttgtggaatttgcaagtggagatttcaagcgctttggggccaaaggcacaaaaggaaatatcttcgtataaaaactagacagaatcattttcagaaactgcactgcgatgtgtgcgttcaactctcagagtttaacttttcttttcattcagcagtttggaaacactctgtttgtaaagtctgcacgtggataatttgaccacttagaggccttcgttggaaacgggtttttttcatgtaaggctagacagaagaattctcagtaacttccttgtgttgtgtgtattcaactcacagagttgaacgatcctttacacagagcagacttgaaagactctttttgtggaatttgcaagtggagatttcagccgctttgaggtcaatagtagaaaaggaaatatcttcgtagaaaaactagacagaatgattctcagaaactcctttgtgatgtgtgtgttcaactcacagagtttaacctttcttttcatagagcagttaggaaacactctgtttgtaaagtctgcaagtggataatcagacctctttgaggccttcgttggaaacgggatttcttcatattatgctagacagaagaattcccagtaacttccttgtgttgtgtgtgttcaactcacagagttgaactttcatttacacagagcagattggaaacactctttttgtggaatttgcaagtggagatttcaagcggtttgaggccaaaggcagaaaaggaaatatcttcgtataaaaactagacagaatcattctcagaaactgctctgcgatgtgtgcgttcaactctcagagtttaacttttcttttcattcagcagtttggaaacactctgtttgtaaagtctgcacgtggatattttgaccacttagaggccttcgttggaaacgggtttctttcctgtaaggctagacagaagaattcccagtaacttccttgtgttgtgtgcattcaactcacagagttgaacgttcccttagacagagcagatttgaaacactctatttgtgcaatttgcaagtgtagatttcaagcgcattaaggtcaatggcagaaaaggaaatatcttcgtttcaaaattagacagaatcattcccacaaactgcgttgtgatgtgttcgttcatctcacagagtttaacctttcttttcatagagcagttaggaaacagtctgtttgtaaattctgtaagtggatattctgagcatcttgtgcccttcattggaaacgggatttcttcatgttctgctagacagaagaattctcagtaacttccttgtgttgtgtgtattcaaatcacagagttcaacgatcctttacacagagcagacttgaaacactctttttgtgaaatttgcaagtggagatttcagccgctttgagttcaatggtagaataggaaatatcttcctatagaaactagacagaatgattctcagaaactcctttgtgatgtgtgcgttcaactcacagagtttaccctttcttttcatagagcagttaggaaacactctgtttgtaaagtctgcaattggatattcagacatccttgaggctttcgttggaaacagggatttcttcatattctgctagaaagaagaattctcagtaacttccttgtgttgtgtgtattcaactgacagagttgaacgatcctttacacagagcagacttgaaacactctttttgtggaatttgcaaggggagatttcaagcgctttggggccaaaggcagaaaaggacatatcttcgtataaaaactagacagaatcattctcagaaactgctctgcgatgtgtgcattcaactctcagagtttaatttttcttttcattcagcagtttggaaacattctctttgtaaagtctgcacgtggatattttgaccacttagaggccttcgttggaaacgggttttattcttgtaaggctagacagaagaattcccagtaacttccttgtgttgtgtacattcaacacacagatttgaacgttcccttagacagagctgatttgaaacactctttttgtgcaattggcaagtggagatttcaagcgctttaaggtcaatggcagaaaagtaaatatcttcgtttcaaaactagacagaatcattcccacaaactgcgttgtgatgtgttcgttcatctcacagagtttaacctttcttttcatagagcagttaggaaacactgtgtttgtaaattctgtaagtggatattctgacatcttgtggccttcgttggaaacgggatttcttcatattctgctagacagaagaattctcagtaacttccttgtgttgtgtgtattcaactcacagagttgaacgatcctttacacagagcagacttgaaacactctttttgtggaatttgcaagtggagatttcagccactttgatgtcaatggtagaaaaggaaatatcttcgtataaagactagacagagtgattctcagaaactcctttgtgatatctgcgttcaactcacagagttcaacctttcttttcatagagcagttaggaaacactctgtttgtaaagtctgcaattggatattgagacctccttgaggccttcgttggaaacgggatttcttcatattctgctatacagaagaattctcagaaacttccttgtgttgtgtgtattcaactcacagagttgaacgatcctttacacagagcagacttgaaacactctttttgtggaattggcaagtggagatttcagctgctttgaggtcaatggtagaaaaggaaatatcttcgtataaaaactagacagaatgattctcagaaactcctttgtgatgtgtgcgttcaactcacagagcttaaccttttttttcatagagcagttgggaaacactctgtttgtaaagtctgcaagtggatattcagacctccttgaggccttcgttggaaacgggatttcttcatattatgctagacagaagaattctcaggaacttccttgtgttgtgtgtattcaactcacagagttgaacgatcctttacacagagcagacttgaaacactctttttgtggaatttgcaagtggagatttcagccgctttgagttcaatggtagaataggaaatatcttcctatagaaagtacacagaatgattctcagaaactcctttgtgatgtgtgcgttcacctcacagagttcaacctttcttttcatagagcagttgggaaacactctgtttgtaaagtctgcaagtggatattcagacttctttgaggccttcgttggaagcgggatttcttcatattctgctagacagaagaattctcagtaactaccttgtgttgtgtgtattcaactgacagagttgaactttcatttagagagagcagatttgaaacactgtttttgtggaatttgcaagtggagatttcaagcgctttggggccaaaggcagaaaaggaaatatcttcgtataaaaactagacagaatcattctcagaaactgctgcgtgatgtgtgcgttcaactctcagagtttaacttttcttttcattcagcggtttggaaacactctgtttgtaaagtctgcacgtggaaattttgaccacttagaggccttcgttggaaacgggttttgttcatgtaaggctagacagaagaattcccagtaacttccttgtgttgtgtgcattcaactcacagagttgaacgttcccttagacagagcagatttgaaacactctatttgtgcaatttgcaagtgtagttttcaagctcttttaggtcaacggcagaaaaggaaatatcttggtttcaaaactagacagaaatcattcccacaaactgcgttgtaatgtgttcgttcaactcacagagtttaacctttctgttcatagagcagttaggaaacactctgtttgtaaagtctgtaagtggatattctgacatcttgtggccttcgttggaaacgggatttcttcatattctgctagacagaagaattctcagtaacttccttgtgttgtgtgtattcaactcacagacttgaacgatcctttacacagagcagacttgaaacactctttttgtggaatttgcaagtggagatttcagccgctttgaggtcaatggtagaaaaggaaatatcttcgtataaaaactagacagaatgattctcagaaacttctttgtgatgtgtgcgttcaactcacagagtttaacctttcttttcatagagcagttaggaaaccctctgtttgtaaactctgcaagtggatattcagacctctttgaggccttcgttggaaacgggatttcttcatactatgctagacagaagaattctcagtaacttccttgtgttgtgtgtattcaactgacacagttgaactttcatttagacagagcagatttgaaacactctttttgtggaatttgcaattggagatttcaagcgctttgaggccaaaggcagaaaaggaaatatcttcgtataaaaactagacagaatcattctcagaaactgctgcgtgatgtgtgtgttcaactctcagagtttaactttccttttcattcagcggtttggaaacactctgtttgtaaagtctgcacgtggatattttgaccacttagaagccttcgttggaaacgggtttttttgtatgtaaggctagacagaagaattcccagtaacttccttgtgttgtgtgcattcaactcacagagttgaacgttcccttagacagagcagatttgaaacactctatttgtccaatttgcaagtgtagatttcaagcgctttaaggtcaacggcagaaaaggaaatatcttcgtttcaaaactagacagaatcattcccacaaactgcgttgtgatgtgtacgttcaactcacagagtttaacctttctgttcatagagcagttaggaaacattctgtttgtaaagtctgtaagtggatattctgacatcttgtggccttcgttggaaacgggatttcttcatattctgctagacagaagaattctcagtaacttccttctgttgtgtgtattcaactcacagagttgaacgatcctttacacagagcagatttgaaacactctttttgtggaatttgcaagtggagatttcagccgctttgaagtcaaatgtagaaaaggaaatatcttcctataaaaactagacagaatgattctcagaaactcctttttgatgtgtgcgttcaactcacagagtttaacctttcttttcatagagcagttaggaaacactctgtttgtaaagtctgcaagtggatattcagacctctttgaggccttcgttggaaacgggtttttttcatataaggctagacagaagaattcccagtaacttccttgtgttgtgtgtgttcaactcacagagttgaactttcatttacacagagcagatttgaaacactctttttgtggaatttgcaagtggagatttcaagcgctttggggccaatggcagaaaaggaaatatcttcgtataaaaactagacagaaatcattctcagaaactgctctgcgatgtgtgcgttcaactctcagagtttaacttttcttttcattcagcagtttggaaacactctgtttgtaaagtctgcacgtggatattttgaccacttagaggccttctttggaaacgggtttttttcatgtaaggctagacagaagaattcccagtaacttccttgtgttgtgtatattcaactcacagagttgaacgttcccttagacagagcagatttgaaacactctttttgtgcaattggcaagtggagatttcaagcgctttaaggtcaatggcagaaaaggaaatatcttcgtttcaaaactagacagaatgattctcagaaactcctttgtgatgtgtgcgttcaactcacagagtttaacctttcttttcatagagcagttaggaaacactctgtttgtaaagtctgcaagtagatattcagacctccttgaggccttcgttggaaacgtgatttcttcatattatgctagacagaagaattctcagtaacttccttgtgttgcgtgtattcaactcacagatttgaacgatcctttacaaagagcagacttgaaacactctttttgtggaatttgcaagtggagatttcagccgctttgaggtcaatggtagaataggaaatatcttcctatagaaactagacagaatgattctcagaaactcctttgtgatgtgtgcgttcaactcacagagtttaacctttcttttcatagagcagttaggaaacactctgtttgtaaagtctgcacgtggatatttggacttccttgaggccttcgttggaaacggtttttttttcatgtaaggctagacagaagaattctcagtaacttcccttgtgttgtgtgtattcaactgacagagttgaactttcatttggagagagcagatttgaaacactgtttttgtggaatttgcaagtggagatttcaagcgctttggggccaaaggcagaaaaggaaatatcttcgtataaaaactagacagaatcattctcagaaactggctctgcgatgtgtgcgttcaactctcagagtttaacttttcttttcattcagcagtttggaaacactctgtttgtaaagtctgcacgtggatattttgaccacttagaggccttcgttggaaacgggtttctttcctgtaaggctagacagaagaattcccagtaacttcccttgtgttgtgtacattcaactcacagagttgaacgttcccttagacagagcagatttgaaacactctttttgtgcaattggcaagtggagatttcaagcgcgttgaggtcaatggcagaaaaggaaatatcttcgtttcaaaactagacagaatcattcccacaaactgcgttgtgatgtgttcgttcaactcacagagtttaacctttcttttcatagagcagttaggaaacagtctgtttgaaaattctgtaagtggatattctcacatcttgtggccttcgttggaaacgggatttcttcatattctgctagacagaagaattctcagtaacttccttgtgttgtgtttattcaactcacagagttgaatgatcctttacacagagcagacttgaaacactctttttgtggaatttgcaagtggagatttcagccgctttgaggtcaatagtagaaaaggaaatatcttcgtagaaaaactagacagaatgattctcagaaactcttttgtgatgtgtgcgttcaactcacagagtttaacatttctgttcatagagccgttaggaaacactctgtttgtaaagtctgcaagtggatattcacacctccttgagaccttcgttggaaacgggatttcttcatattctgctagacagaagaattttcagtaacttccttgtgttgtgtgtattcaactgacagagttgaactttcatttagacagagcagatttgaaacactctttttgtggaatttgcaagtggagatttcaagcgctttgaggccaaaggcagaaaaggaaatatgttcgtataaaaactagacagaatcattctcagaaactgctctgcgatgtgtgtgttcaactctcagagtttaacttttcttttccttcagcagtttggaaacactctgtttgtgaagtctgcacgtggatattttcaccacttagaggccttcgttggaaacgggtttttttcctgtaaggctagacagaagaattcccagtaacttccttgtgttgtgtacattcaactcacagagttgaacgttcccttagacagagcagatttgaaacactctttttgagcaattggcaaatggagatttcaagcgctttaaggtcaatggcagaaaaggaaatatcttcgtttcaaaactagacagaatgattctcataaactcctttgtgatgtgtgcgttcaactcacaaagtttaacttttcttttcatagggcagttaggaaacactctgtttgtaaagtctgcaagtggatattcagacctctttgaggccttcgttggaaacgggatttcttcatattatgctagacagaagaattctcagtaacttccttgtgttgtgtgtattcaactcacagagttgaacgatgctttacacagagcagacttgaaacattctttttgtggaatttgcaactggagatttcagccgctttgaggtcaatggtagaataggaaatatcttcctatagaaactagacagaatgattttgagaaactcctttgtgatgtgtgcgttcaactcacagagtttaacctttcttttcatagagcagttaggaaacactctgtttgtaaagtctgcaagtggatattcagacatccttgaggcttttgttggaaacgggatttcttcatattctgctagaaagaagaattctcagaaacttccttctgttgtgtgttttcaactcacagagttgaacgaacctttacacagagtagacttgaaacactctttttgtggaattggcaagtggagatttcagccgctttgaggtcaatggtagaaaaggaaatatcttcgtataaaaactagacagaataattctcagaaactcctttgtgatgtgtgcgttcaactcacggagtttaacctttcttttcatagagcagttaggaaacactctgtttgtaaagtctgcaagtggatattcagacctctttgaggccttcgttggaaacgggatttcttcatattatgctagacacaagaattcccagtaacttccttgtgttgtgtgtgttcaactcacagagttgaactttcatttacccagagcagatttgaaacactctttttgtggaatttgcaagtggagatttcaagagctttgaggccaaaggcagaaaaggaaatatcttcgtataaaaactagacagaatcattctcagaaactgctctgcgatgtgtgcgttcaactctcagagtttaacttttcttttcattcagcagtttggaaacactctgtttgtaatgtctgcacgtggataatttgaccacttagaggcattcgttggaaacgggtttttttcatgtaaggctagacagaagaattcccagtaacttccttgtgttgtgtgcattcaactcacagagttgaacgttcccttagacagagcagatttgaaacactctatttgtgcagtttgcaagtgtagatttcaagcgctttaaggtcaatggcagaaaaggaaatatcttcgtttcaaaacttgacagaaatcattcccacaaactgcgttgtgatgtgtgcgttcaactcaaagagtttaacctttcttttcatagagcagttaggaaacactctgtttgtaaagtctgcaagtggatattcagacctccttgaggccttcgttggaaacgggatttcttcatattctgctagacagaagaattctcagtaacttccttgtgttgtgtgtattcaactcacagagttgaatgatcctttacgcagaacagacttgaaacactcttgttgtggaatttgcaagtggagaattcagccgctttgagttcaacggtagaataggaaatatcttcctatagaaactagacagaacgattctcagaaactcctttgtgatgtgtgcgttcaactcacagagtttaacctttcttttcatagagcagttaggaagcactctgtttgtaaagtctgcaagtggatattcagacctctttgaggccttcgttggaaacgggatttcttcctattctgctagacagaagaattctcagtaacttccttgtgttgtgtgtattcaaatgacagagttgaactttcatttagagagagcagatttgaaacactgtttttgtggaatttgcaagtgaagatttcaagcgctttggggccaaaggcagaaaaggaaatatcttcgtataaaaactagacagaatcattctcagaaactgctctgtgatgtgtgcgtacaactctcagagtttaacttttcttttcattcagcagtttggaaacactctgtaaagtctgcacgtagatattttgaccacttagaggccttcgttggaaacgggtttttttcatgtaaggctagacagaagaattcccagtaacttccttgtgttgtgtgcattcaactcacagagttgaacgttcccttagacagagcagatttgaaacactctatttgtgcaatttgcaagtgtagatttcaagcgctttcaggtcaatggcagaaaaggaaatatcttcgtttcaaaactagacagaatcattcccacaaactgcgttgtgatgtgttcgttcaactcacacagcagttaggaaaccaactcacctttcttttcatagagcagttaggaaacactctgttggtaaattctgtaagtggatattctgacatcttgtggccttcgttggaaacgggatttcttcatattctgctagacagaagaattctcagtaacttccttgtgttgtgtgtattcaactcacagagttgaacgatcctttacacagagcagactttaaacactctttttgtggaatttgcaagtggagatttcagccgctttgaggtcaatagtagaaaaggaaatatcttcgtagaaaaactagaaagaatgattctcagaaactcctttgtgatgtgtgtgttctactcacagagtttaacctttcttttcatagagcagttagtaaacactctgtttgtaaagtctgcaagtggatattcagacccctttgaggccttcgttggaaacgggatttcttcatattatgctagacagaagaattctcagtaacttccttgtgttgtgtgtattcaactgacagagttgaactttcatttagagagagcagatttgaaacactgtttttgtggaatttgcaagtggagatttcaagcgctttggggccaaaggcagaaaaggaaatatgttcgtataaaaactagacagaatcattctcagaaactgctctgcgatgtgtgagttcaactctcagagtttaactttgcttttcattcagcagtttggaaacactctgtttgtaaagtctgcacgtggatattttgaccacttagaggccttcgttggaaacgggtttttttcatgtaaggctagacagaagaattcccagtaacttccttgtgttgtgtacattcaactcacagagttgaacgttcccttagacagagcagatttgaaacactctttttgtgcaattggcaagtggagatttcaagcgctttgaggtcaatggcagaaaaggaaatatcttcgtttcaaaactagacagaacgattctcagaaactcctttgtgatgtgtgcgttcaactcacagagtttaacctttcttttcatagagcagttaggaaacactctgtttgtaaagtctgcaagtggatattcagacctctttgtggccttcgttggaaacgggatttcttcatattctgctagacagaagaattctcagtaacttccttgtgttgtgtgtattcaactcacagagttgaacgatcctttacacagagcagacttgaaacactctttttgtggaatttgcaagtggagatttcagccgctttgaggtcaatagtagaaaaggtaatatcttcgtagaaaaactagacagaatgattctcacaaactcctttgtgatgtgtgtgttcaactcacagagtttaacctttcttttcttagagcagttaggaaacactctctttgtaaagtctgcaagtggatattcagacctctttgaggccttcgttggaaacgggtttttttcatataaggctagacagaataattctcagtaacttccttgtgttgtgtgtattcaactgtcagagttgaacgatcctttacagagagcagacttgaagcactctttttgtggaatttgcaagtggagatttcagccgctttgaggtcaatggtagaataggaaatatcttcctatagaaactagacagaatgattctcagaaactcctttgtgatgtgtgcgttcaactcacagagtttaacttttcttttcatagagcagttaggaaacactctgtttgtaaagtctgcaagtggatattcagacgtctttgaggccttcgttggaaacgggatttcttcatattatgctagacagaagaattctcagtaacttccttgtgttgtgtgtattcaactcacagagttgaacgatgctttacacatagcagacttgaaacactctttttgtggaatttgcaagtggagatttcagccgctttgaggtcaatggtagaaaaggaaatatcttcgtataaagactagacagaatgattctcagaaactcctttgtgatgtgtgcgttcaactcacagagtttaacctttcttttcatagagcagttaggaaacactctgtttgtaaagtctgcaagtggatattcagacctctttgaggccttcgttggaaacgggtttttttcttataaggctagacagaagaattctcagtaacttccttgtgttgtgtgtattcaactcacagagttgaacgatcctttacacagagcagacttgaaacactctttttctggaatttgcaagcggagatttcagctgcgttgaggtcaatggtagaaaaggaaatatcttcgtataaaaactagacagaatgattctcagaaactcctttgtgatgtgtgcgttcaactcacagagtttaacctttctgttcatagagcagttaggaaacactctgtttgtaaagtctgcaagtggatattcagacctctttgagaccttcgttggaaacgggatttcctcatattctgctagacagaagaattcccagtaacttccttgtgttgtgtgtgttcaactcacagagttgaactttcatttacacagagcagatttgaaacactctttttgtggaatttgcaagtggagatgtcaagcgctttgaggccaaaggcagaaaaggaaatatcttcgtataaaaactagacagaatcattctcagaaactgctgcgtgatgtgtgcgttcaactctcagagtttaacttttcttttcattcagcggtttggaaacactctgtttgtaaagtctgcacgtggatattttgaccacttagaggccttcgttggaaacgggttttttgcatgtaaggctagacagaagaattctcagtaacttccttgtgttgtgtgtattcaactcacagagttgaacgttcccttagacagagcagatttgaaacactctatttgtgcaatttgcaagtgtagttttcaagctctttaaggtcaacggcagaaaaggaaatatcttcgtttcaaaactagacagaatcattcccgcaaactgcgttgtgatgtgttcgttcaactcacagagtttaacctttctgttcatagagcagttaggaaacactctgtttgtaaagtctgtaagtggatattctgacatcttgtggccttcgttggaaacgggatttcttcatattctgctagacagaagaattctgagaaacttccttgtgttgtgtgttttcaactcacagagttgaacgatgctttacacagagtagacttgaaacactgtttttgtgtaatttgcaagtggagatttcagccgctttgaggtcaatggtagaaaaggaaatatcttcgaataaaaactagacagaatgattctcagaatcttctttgtgatgtgtgcgttcaactcacagagtttaacctttcttttcatagagcagttaggaaacactctgtttgtatactctgcaagtggatattcagtcctcattgaggccttcgttggaaacgggatttcttcatactatgctagacagaagaattcccagtaacttccttgtgttgtgtgtgttcaactcacagagttgaactttcatttacacagagcagatttgaaacactctttgtgtggaatttgcaagtggagatttcaagcgctttgaggccaaaggcagaaaaggaaatatcttcgtttcaaaactagacagaatcattctcagaaactgctctgcgatgtgtgcgttcaactctcagagtttaacttttcttttcattcagcagtttggaaacactctgtttgtaaactctgcaagtggatattcagacctctttgaggccttcgttggaaacgggatttcttcatactatgctagacagaagaattctcagtaacttccttgtgttgagtgtattcaactgacagagttgaactttcatttagagagagtagttttgaaacactgtttttgtggaatttgcaagtggagatttcaagcgctttggggccaaaggcagaaaaggaaatatcttcgtataaaaactagacagaatcgttctcagaaactgctgcgtgatgtgtgcgttcaactctcagagtttaacttttcttttcattcagcggtttggaaacactctgtttgtaaagtctgcacgtggacagtttgaccacttagaggccttcgttggaaacgggtttttttcatgtaaggctagacagaagaattcccagtaacttccttgtgttgtgtgcattcaactcacagagttaaacgttcccttagacagagcagatttgaaacactctatttgtgcaatttgcaagtgtagatttcaagcgctttaaggtcaacggcagaaaaggaaatatcttcgtttcaaaactagacagaatcattcccacaaactgcgttgtgatgtgttcgttcaactcacagagtttaacctttccgttcatacagcagttaggaaacactctgtttgtaaagtctgtaagtggatattctgacatcttgtggccttcgttggaaacgggatttcttcatattctgctagacagaagaattctcagtaacttccttgtgttgtgtgtattcaactcacagagttgaacgagcctttacacagagcagacttgaaacactctttttgtggaatttgcaagtggagatttcagccgctttgaggtcaatggtagaataggatatatcttcctatagaaactagacagaatgattctcagaaactcctttgtgatgtgtgcgttcaactcacagagtttaacctttcttttcatagagcagttaggaaacactctgtttgtaaagtctgcaattggatattcagacctctttgaggccttcgttggaaacgggatttcttcatattccgctagacagaagaattctcagtaacttccttgtgttgtgtgtattcaactcacagagttgaacgatcctttacacagagcagacttgaaacactctttttgtgtaatttgcaagtggagatttcagccgctttgaggtcaatagtagaaaaggaaatatcttcgtagaaaaactagacagaatgattctcagaaactcctttgtgatgtgggcgttcaactcacagagtttaacctttcttttcatagagccgttaggaaacactctgtttgtaaagtctgcacgtggatatttggacttctttgaggccttcgttggaaacgggtttttttcatgtaaggctagacggaagaattcccagtaacttccttgtgttgtgtacattcaactcacagagttgaacgttcccttagacagagcagatttgaaacactctttttgtgcaattggcaaatggagatttcaagcgctttaagttcaaaggcagaaaaggaaatatcttcgtttcaaaactagacagaatcattcccacaaactgcgttatgatgtgttcgttcatctcacagagtttaacctttcttttcatagagcagttaggaaacagtctgtttgtaaattctgtaagtggatattctgacatcttgtggccttcgttggaaacgggatttcttcatattctgctagacagaagaattctcaggaacttccttgtgttgtgtgtattcaactcacagagttgaacgatcctttacacagagcagacttgaaacacactttttgtggaatttgaaagtggagatttcagccgctttgaggtcaatggtagaataggaaatatcttcttatagaaactagacagaatgattctcagaaactcctttgtgatgtgtgcgttcaactcacagagtttaacctttcgtttcatagagcagttaggaaacactctgtttgtaaagtctgcaattggatattaagacctctttgaggccttcgttggaaacgggatttcttcatattctgctagacagaagaattctcagtaacttccttgtgttgtgtgtattcaactcacagagttgaacgatcctttacacagagcagtcttgaaacactctttttgtggaatttgcaagtggagatttctgccgttttgaggtcaatgatagaataggaaatatcttcctatagaaactagacagaatcattctcagaaactgctctgcgatgtgtgcgttcaactctcagagtttaacttttcttttcattcagcagtttggaaacactctgtttgtaaagtctgcacgtggataacttgaccacttataggccttcgttggaaacgggtttttttcatgtaaggctagacagaagaattcccagtaacttccttgtgttgtgtacattcaactcacagagttgaacgttcccttagacagagcagatttgaaacactctttttgtgcaattggcaagtggtgatttcagccgctttgaggtcaatggtagaaaaggaaatatcttcgtataaaaactagacagaatcattctcagaaactgcactgcgatgtgtgcgttcaactctcagagtttaacttttcttttcattcagcagtttggaaacactctgtttgtaaagtctgcacgtggataatttgaccacttagaggccttcgttggaaacgggtttttttcatgtaaggctagacagaagaattctcagtaacttccttgtgttgtgtgtattcaactcacagagttgaacgatcctttacacagagcagacttgtaacactctttttgtggaatttgccagtggagatttcagccgctttgaagtcaaaggtagaaaaggaaatatcttcctataaaaactagacagaatgattctcagaaacttctttgtgatgtgtgcgttcaactcacagagtttaacctttcttttcatagagcagttaggaaacactctgtttgtaaaatctgcaagtggatattcagacctctttgaggccttcgttggaaacgggatttcttcatactatgctagacagaagaattcccagtaacttccttgtgttgtgtgtgttcaactcacggagttgaactttcatttacacagagcagatttgaaacactctttttgtggaatttgcaagtggagatttcaagcgctttgaggccaaaggcagaaaaggaaatatcttcgtttgaaaactagacagaatcattctcagaaactgctctgtgatgtgtgcgttcaactctcagagtttaacttttcttttcattcagcagtttggaaacactctgtttgtaaagtctgcacgtggataatttgaccacttagaggccttcgttggaaacggttttttttaatgtaaggctagacagaagaattcccagtaacttccttgtgttgtgtgcattcaactcacagagttgaacgttcccttagacagagcagatttgaaacactctatttgtgcaatttgcatgtgtagatttcaagcgctttaaggtcaatggcagaaaaggaaatatcttcgtttcaaaactagacagaatcattcccacaaactgcgttgtgatgtgttcgttcaactcacagagttttacctttctgttcatagagcagttaggaaacactctgtaaagtctgtaagtggatattctgacatcttgtggccttcgttggaaacgggatttcttcatattctgctagacagaagaattctcagtaacttccttgtgttgtgtgtattcaactcacagagttgaacgatcctttacacagagcagacttgaaacactctgtttgtggaatttgcaagtggagatttcagccgctttgatgtcaatggtagaaaaatgaaatatcttcgtataaagactagacagaatgattctcagaaactcttttgtgatgtgtgcgttcaactcacagagtttaacctttctgttcatagagccgttaggaaacactctgtttgtaaagtctgcaagtggatattcacacctccttgagaccttcgttggaaacgggatttcttcatattctgctagacagaagaattcccagtaacttccttgtgttgtgtgtgttcaactcacagagttgaactttcatttacacagagcagatttgaaacactctttttgtggaatttgcaagtggagatttcaagcgctttgaggccaaaggcagaaaaggaaatatcttcgtttcaaaactagactagaatcattctcggaaactgctctgtgatgtgtgcgttcaactctcagagtttaacttttcttttcattcagcagtttggaaacactctgtttgtaaagtctgcacgtggatattttgaccacctaaaggccttcgttggaaacgtgtttttttcctgtaaggctagacagaagaattcccagtaacttccttgtgttgtgtacattcaactcacagagttgaacgttcccttagacagagcagatttgaaacactctttttgtgcaattggcaagtggtgatttcagccgctttgaggtcaatggtataaaaggaaatatcttcgtattaaaactagacagaatgattctcagaaacttcattgggatgtgtgcgttcaactcacagagtttaacctttcttttcatagagcagttaggaaacactctgtttgtaaactctgcaagtggatattcagacctctttgaggccttcgttggaaacgggatttcttcatactgtgctagacagaagaattctcagtaacttccttgtgttgtgtgcattcaactcacagagttgaacgatcctttacacagagcagattagaaaccctctttttgtggaatttgcaagtggagatttcaagcactttgaggtcaatggtagaaaaggaaatatcttcgtataaaaactagacagaatgattctcagaaacttctttgtgatgtgtgcgttcaactcacagagtttaacctttcttttcatagagcagttaggaaacactctgtttgtaaactctgcaagtggatattcagacctctttgaggccttcgttggaaacgggtttttttcatataaggctagacagaagagttctcagtaacttccttgtgttgtgtgtattcaactgacagagttgaactttcatttagagagagcagatttgaaacactgtttttgtggaatttgcaagtggagatttcaagcgctttggggccaaaggcagaaaaggaaatatcttcgtataaaaactagacagaatcattctcagaaactgctgcgtgatgtgtgcgttcaactctgagagtttaacttttcttttcattcagcggtttggaaacactctgtttgtaaagtctgcacgtggaaattttgaccacttagaggccttcgttggaaacgggattttttcatgtaaggctagacagaagaattctgagtaacttccttgtgttgtgtgtattcaactgacagagttgaactttcatttagagagagcagatttgaaacactgtttttgtggaatttgcaattggagatttcaagcgctttggggccaaaggcagaaaaggaaatatcttcgtataaaaactagacagaatcattctcagaaactgctctgcgatgtgtgcgttcaactctcagagtttaacttttcttttcattcagcagtttggaaacactctgtttgtaaagtctgcacgtggataatttgaccacttagaggccttcgttggaaacgggtttttttcatgtaaggttagacagaagaattctcagtaactttccttgtgttgtgtgtattcaactcacacagttgaacgatcctttacacagagcagacttgtaacactctttttgtggaatttgcaagtggagatttcagccgctttgaagtcaaaggtagaaaaggaaatatcttcctataaaaactagacagaaatgattctcagaaactcctttgtgatgtgtgcgttcaactcacagagtttaacctttcttttcatagagcagttaggaaacactctgtttgtaaagtctgcaagtggatattcagacctctttgaggccttcgttggaaacgggatttcttcatactatgctagacagaagaattctcagtaatttccgcgtgttgtgtgtattcaactcacagagttgaacgatcctttacacagagcagacttgaaacactctttttgtggaatttgcaagtggagatttcagccgctttgaagtcaaaggtagaaaaggaaatatcttcctataaaaactagacagaatcattctcagaaactgctgcgtgatgtgtgcgttgaactctcagagtttaacttttcttttcattcagcggtttggaaacactctgtttgtaaagtctgcacgtggatattttgaccacttagaggccttcgttggaaaccggtttttttcatgtaagcctagacagaagaattcccagtaacttccttgtgttgtgtgcattcaactcacagagttgaacgttcccttagacagagcagatttgaaacactctatttgtgcaatttgcaagtgtagttttcaagctctttaaggtcaacggcagaaaaggaaatatcttggtttcaaaactagacagaatcattcccacaaactgcgttgtgatgtgttcgttcaactcacagagtttaacatttctgttcatagagcagttaggaacactctgtttgtaaagtctgtaagtggatattctgacatcttgtggccttcgttggaaacgggatttcttcatattctgctagacagaagaattctcagtaacttccttgtgttgtgtgtattcaattcacagtgttgaacgatcctttacacagagcatacttgaaacactcttcttgtggaatttgcaagtggagatttcagccgatttgaggtcaatggtagaataggaaatatcttcgtataaaaactagacagaatgattctcagaaactcctttgtgatctgtgtgttcaactcacagagtttaacctttcttttcatagagcagttaggaaacactctgtttctaaagtctgcaagtggatattcagacctctttgaggccttcgttggaaacgggtttttttcatataaggctagacagaagaattctcagtaacttcattgtgttgtgtttattcaactcacagagttgaatgatcctttacacagagcagacttgaaacactctttttgtggaatttgcaagtggagatttcagccgctttgaggtcaatggtagaaaagtaaatatcttcgtataaagactagacagaatgattctcagaaacttctttgggatgtgtgcgttcaactcacagagtttaacctttcttttcatagagcagttaggaaacactctgtttgtaaactctgcaagtggatattcagacctctttgaggccttcgttggaaacgggatttcttcatactatgctagacagaagaattcccagtaacttccttgtgttgtgtgtgttcaactcacagatttgaactttcatttacacagagcagatttgaaacactctttttgtggaatttgcaagtggagatttcaatggctttgaggccaaaggcagaaaaggaaatatcttcgtttcaaaactagacagaatcattctcagaaactgctctgcgatgtgtgcgttcaactctcagagtttaacttttcttttcattcagcagtttggaaacactctgtttttaaagtctgcacgtggatattttgaccacttagacgccttcgttggaaactggtttttttccagtaaggctagacagaataattctcagtaacttcccttgggttgtgtgtattcaactcacagagttgaaggatcctttacagagagcaggcttgaaacactctttttgtcgaatttgcaagtggagatttcagccgctttgtggtcaatggtagaataggaaatatcttcttatagaaactagacagaatgattctgagaaactcctttgtgatgtgtgcgttcaactcacagagtttaacctttcttttcatagagcagttaggaaacactctgtttctaaagtgtgcaagtggatattcagacctccttgaggccttcgttggaaacgggatttcttcatattatgctagacagaagaattcccagtaacttccttgtgttgtgtgtgttcaactcacagtgttgaactttcatttacacagagcagattggaaacactctttttgtggaatttgcaagtggagatttcaagcgctttgaggccaaaggcagaaaaggaaatatcttcgtataaaaactagacagaatgattctcagaaacttctttgtgatgtgtgcgttcaactcacagagtttaacctttcttttcatagagcagttaggaaacactctgtttgtgaactctgcaagtggatattcagacctgtttgaggccttcgttggaaacgggatttcttcatactattctagacagaagaattctcagaaactcccttgtgttgtgtgtattcaactgacagagttgaactttcatttagacagagcagatttgaaacactctttatgtggaattggcaagtggagatttgaagcgctttgagaccaaaggcagaaaaggaaatatcttcgtttcaaaactagacagaatcattcccacaaactgcgttgtgatgtgttcgttcaactcacagggtttaacctttcttttcatagagcagttaggaaacactctgtttgtaaagtctgtaagtggatattctgacatcttgtggccttctttggaaacgggatttcttcatattctgctagacagaagaattctcagtaacttccttgtgttgtgtgtattcaactgacagagttgaaggatcctttacagagagcaggcttgaaacactctttttgtcgaatttgcaagtggagatttcagccgctttgaggtgaatggtagaataggaaatatcttcttatagaaactagacagaatgattctcagaaactcctttgtgatgtgtgcgttcaactcacagagtttaacctttcttttcatagagcagttaggaaacactctgtttgtaaagtctgcacgtggatatttggacttctttgaggccttcgttggaaacgggtttttttcatgtaaggctagacggaggaattctcagtaacttccttgtgttgtgtgtattcaactgacagagttgaactttcatttagagagaggagatttgaaacactgtttttgtggaatttgcaagtttagatttcaagcgctttggggccaaaggcagaaaaggaaatatcttcgtataaaaactagacagaatcattctcagaaactgctctgcgatgtgtgcgttcaactctcagagtttaacttttcttttcattcagaagtttggaaacactctgtttgtaaagtctgcacgtggatattttgaccatttagaggctttcgttggaaacgggtttttttcttgtaaggctagacagaagaattctcagtaacttcattgtgttgtgtgtattcaactcacagagttcaacgatcctttacacagagcagacttgaaacactctttttctggaatttgcaagtggagatttcagccgctttgaggtcaatggtagaaaagaaatatcttcctataaaaactagacagaatgattctcagaaactcctttgtgatgtgtgcgttcaactcacagaggttaacctttcttttcatagagcagttaggaaacactctgtttgtaaagtctgcaagtggagattcagacctgcttgaggcattcgttggaaacgggatttcttcatattatgctagacagaagaattctcagtaagttccttgtagtgtgtgtattcaactcacagagttgaacgatcctttacacagagcagacttgaaacactctttttgtgtaatttgcaagtggagatttcagccgctttgaggtcaatggtagaataggaaatatcttcctatagaaactagacagaatgattctcagaaactcctttgtgatgtgtgcgttcaactcacagagtttaacctttcttttcatagagcagttgggaaacactctgtttgtatagtgtgcaagtggatattcagacctctttgaggccttcgttggaaacgggatttcttcatattctgctagacagaagaattcccagtaactttccttgtgttgtgtgtgttcaactcacagagttgaacttccatttacacagagcagatttgaaacactctttttgtggaatttgcaagtggagatttcaagcgctttgaggccaaaggcagaaaaggaaatatcttcgtttcaaaactagacagaatcattctcagaaactgctctgcgatgtgtgcgttcaactctcagagtttaacctttcttttcattcagcagtttggaaacactctgtttgtaaagtctgcacgtggatattttgaccatttagaggccttcgttggaaacgggtttttttcttgtaaggctagacagaagaattcccagtaacttccttgtgttgtgtacattcaactcacagagttgaacgttcccttagacagagcagatttgaaacactctttttgtgcaattggcaagtggagatttcaagcgctttaaggtcaatggcagaaaaggaaatatcttcgtttcaaaactagagagaatcattcccacaaactgcgttgtgatgtgttcgttcaactcacagagtttaacctttcttttcatagagcagttgggaaacagtctgtttgaaaattctgtaagtggatattctgacatcttgtggccttcgttggaaacgggatttcttcatattctgctagacagaagaattctcagtaacttccttgtgttgtgtgtattcaactcacagagttgaacgatcctttacacagagcagacttgaaacactctttttgtggaatttgcaagtggagatttcagccgctttgaggtcaatagtagaaaaggaaatatcttcgtagaaaaactagacaagaatgattctcagaaactcctttgtgatgtgtgcgttcaactcacaaagttcaacctttcttttcatagagcagttgggaaacactctgtttgtaaagtctgcaagtggatattcagacttctttgaggccttcgttggaagcagggatttcttcatattctgctagacagaaaaattctcagtaacttccttgtgttgtgtgtattcaactcacagagttgaacgatcctttacacagagcagacttgaaacactctttttgtcgaatttgcaagtggagatttcagccgctttgaggtcaatggtagaataggaaatatcttcttatagaaactagacagaacgattctcagaaactgctttgtgatgtgtgcgttcaactcacagagtttaacctttcttttcatagagcagttaggaaacactctgtttgtaaagtctgcaagtggatattcagacctctttgaagccttcgttggaaacgggattgcttcatattctgctagacagaagaattctcagaaacttccttgtgttgtgtgtattcaactcacagagtttaacgatcgtttacacagaacagacttgagacactctttttgtggaatttgtaagtggagatttcagccactttgaggtcaatggtagaaaaggaaatatcttcatataaaaactagacagaataattctcagaaactgctgcgtgatgtgtgcgttcaactctcagagtttaacttttcttttcattcagcggtttggaaacactctgtttgtaaagtctgcacgtggttattttgaccacttagaggccttcgttggaaacgggttttcttcatgtaaggctagacagaagaattcccagtaacttccttgtgttgtgtacattcaactcacagagttgaacgttcccttagacagagcagatttgaaacactctttttgtgcaattggcaagtggtgatttcagcctctttgaggtcaatggtagaaaaggaaatatcttcgtacaaaaactagacagaatgattctcagaaactcctttgtgatgtgtgcgttccactcacagagtttaacctttcttttcatagagcagttaggaaacactctgtttgtaaagtctgcaagtggatattcagacctccttgaggccttcgttggaaacgggatttctacatattatgctagacagaagaattctcagtaacttccttgtgttgtgtgtattcaactcacagagttgaacgatcctttacacagagcagacttgaaacactctttttgtgaaatttgcaagtggagatttcagcctctttgaggtcaatggtagaataggaaatatcttcctatagaaactagacagaatgattctgagaaactcctttgtgatgtgtgcattcaactcacagagtttaacctttcttttcatagagcagttaggaaacactctgcttgtaaagtctgcaagtggatactcagacctccttgaggccttcgttggaaacgggatttcttcctattatgctagacagaagaattcccagtaacttccttgtgttgtgtgtgttcaactcacagagttgaactttgatttacacagagcagatttgaaacactctttttgtggaatttgcaagtggagatttcaagcgctttgaggccaaaggcagaaaaggaaatatcttctgtataaaaactagactagaatcattctcagaaactgctgcgtgatgtgtgcgttcaactctcagagtttaacttttcttttcattcagcggtttggaaacaccctgtttgtaaagtctgcacgtggatattttgaccacttagaggccttcgttggaaacgggattttttcatgtaaggctagacagaagaattcccagtaacttccttgtgttgtgtacattcaactcacagagttgaacgttcccttagacagagcagatttgaaacactctttttgtgcaattggcaaatggagatttcaagcgctttaaggtcaatggcaggaaaggaaatatcttcgtttcaaaactagacagaatgattctcagaaccttctttgtgatgtgtgcgttcaactcacagagtttaacctttcttttcatagagcagttaggaaacactctgtttgtaaactctgcaagtggatattcagacctctttgaggccttcgttggaaacgggatttcttcatactatgctagacagaagaattctcagtaacttccttgtgttgtgtgtattcaactcacagagttgaacgatcctttacacagagcagacttgtaacactctttttgtggaatttgcaagtggagatttcagccgctttgaagtcaaaggtagaaaagggaatatcttcctataaaaactagacagaatgattctcagaaactcctttgtgatgtgtgcgttcaactcacagagtttaacttttcttttcatagagcagttaggaaacactctgtttgtaaagtctgcaagtggatattcagacctctttgaggccttcgtttgaaatgggatttcttcatattatgctagacagaagaattctcagtaacttccttgtgttgtgtgtattcaactgacagagttgaactttcatttagagagagcagatttgaaacactgtttttgtggaatttgcaagtggagatatcaagcgctttggggccaaaggcagaaaaggaaatatcttcgtataaaaactagacagaatcattctcagaaactgctctgtgatgtgtgcgttcaactctcagagtttaacttttcttttcattcagcagtttggaaacactctgtttgtaaagtctgcacgtggataatttgaccacttagaggccttcgttggaaactggtttttttcatgtaaggctagacagaaagaattcccagtaacttccttgtgttgtgtacattcaactcacagagttgaacgttcccttagacagagcagatttgaaacactctttttgtgcaattggcaaatggagatttcaagcgctttaagttcaatggcagaaaaggaaatatcttcgtttcaaaactagacagatcattcccacaaactgcgttgtgatgtgttcgttcaactcacagagtttaacctttcttttcgtagagcagttaggaaacagtctgtttgtaaattctgtaagtggatattctgacatcttgtggccttcgttggaaacgggatttcttcatattctgctagacagaagaattctcagaatcttccttgtgttgtgtgtattcaactcacagagttgaacgatcctttacacagagcagacttgtaacactctttttgtggaatttgcaagtggagatttctgccgctttgaagtcaaaggtagaaaaggaaatatcttcctataaaaactagacagaatgattctcagaaactcctttgtgatgtgtgcgttcaactcacatagtttaacctttcttttcatagagcagttaggaaacactctgtttgtaaagtctgcaagtggatattcagacatcctagaggctttcgttggaaacgggatttcttcatattctgctagacagaagaattctcagaaacttcgttgtgttgtgtgttttcaactcacagagttcaacgatcctttacacagagtagacttgaaacactctttttgtggaagtggcagggtggagatttcagccgctttgaggtcaatggtagaaaaggaaatatcttcgtatgaaaactagacagaatgattctcagaaactcctttgtgatgtgtgcgttcaactcacagagtttaacttttcttttcatacagcagttaggaaacactctgtttgtaaagtctgcaagtggatattcagacctctttgaggccttcgttggaaacgggatttcttcatattatgctagacagaagaattctcagtaacttccctgtgttgtgtgtattcaactcacagagttgaacgatcctttacacagagcagacttgaaacactctttttgtggaatttacaagtggagatttcagccgatttgaggtcaatggtagaaaaggaaatatcttcctatagaaactagacagaatgattctcagaaactcctttgtgatgtgtgcgttcaactcacagagtttaactttccttttcatagagcagttaggaaacactctgtttgtaaagtcttcatgtggatattcattcctctttgaggccttcgttggaaacgggatttcttcatattctgctagacagaagaattctcagtaacttccttgtgttgtgtgtattcaactcacagagttcaacgatcctttacacagagcagacttgaaacactctttttgtggaatttgcaagtggagatttcagccgctttgaagtcaatggtagaaaaggaaatatcttcgtataaaaactagacagataatcattcccacaaactgcgttgtgatgtgttcgttcaactcacagagtttaaccgttcttttcatagagcagttaggaaacactctgtttgtaaattctgtaagtggatattctgacatcttgtggccttcgttggaaacgggatttcttcatgttctgctagacagaagaattctcagtaacttccttgtgttgtgtgtattcaactcacagagttgaacagtggtttacacagagcagatttgaaacactctttttgtggaatttgcaagtggagatttcagccgctttgaggtcaatggtagaaaaggaaatatcttcgtataaaaactagacagaatgattctcataaactcctttgtgatgtgggcgttgaactcacagagtttaacctttcttttcatagagcagttaggaaccactctgtttgtaaagtctgcaaatggatattcagacctctttgaggccttctttggaaacgggatttgttcatattctgctagacacaataattctcagtaacttccttgtgttgtgtgtattcaactcacagagttgaacgatcctttatagagagcagacttgaaacactctttttgtggaatttgcaagtggagatttcagcctctttgaggtcaatggtagaataggaaatatcttcctatagaaactagacagaacgattctcagaaactcctttgtgatgtgtgcgttcaactcacagagtttaacctttcttttcatagagcagttaggaaacactctgtttgtaaagtctgcacgtggatattcagacgtctttgaggccttcgttagaaacgggatttcttcctattctgctagacagaagaattctcagtaacttccttgtgttgtgtgtattcaactcacagagttgaacgatcctttacacagagcagacttgaaacactctttttgtggaatttgcaagtggagatttcagccgctttcaggtcaagagaagaaaaggaaatatcttcgtagaaaaactagacagaatgattctcagaaactcctttgtgatgtgtgctttcaagtcacagagtttaacctttcttttcatagagcagttaggaaacactctgtttgtaaagtctgcaagtggatattcagacgtctttgaggccttcgttggaaacgggatttcttcatattctgctagacagaagaattcccagtaacttccttgtgttgtgtgtgttcaactcacagagttgaactttcatttacacagagcagattagaaacactctttttgtggaattcgcaagtggagatttcaagcgctttgaggccaaaggcagaaaaggaaatatcttcgtttcaaaactagacagaatcattctcagaaactgctctgcgatgtgtgcgttcaactctcagagtttaacttttcttttcattcagcagtttggaaacactctgtttgtaaagtctgcacgtggatattttgaccacttagaggccttcgttggaaacgggttttattcctgtaaggctagacagaagaattcccagtaactaccttgtgttgtgtgcattcaactcacagagttgaacgttcccttagacagagcagatttgaaacactctatttgtgcaatttgcaagtgtagatttcaagcgctttaaggtcaacggcagaaaaggaaatatcttcgtttcaaaattagacagaatcattcccacaaactgcgttgtgatgtgttcgttcaactcacagagtttaacctttctgttcatagagcagttaggaaacactctgtttgtaaagtctgtaactggatattctgacatcttgtggccttcgttggaaacgggatttcttcatattctgctagacagaagaattctcagtaacttccttgtgttgtgtgtattcaactcacagagttgaacgaccctttacagagagcagacttgaaacactctttttgtggaatttgcaagtggagatttcagccgctttgaggtcaatggtagaaaaggaaactatcttcgtataaagactagacagaatgattctcagaaactgttttgtgatgtgtgcgttcaactcacagagttcaacctttcttttcatagagcagttgggaaacactctgtttgtaaagtctgcaagtggatattcagacttctttgaggccttcgttggaagcgggatttcttcatattctgctagacagaagaattcccagtaacttccttgtgttgtgtgtgttcaactcacagagttgaactttgatttacacagagcagatttgaaacactctttttgtggagtttgcaagtggagatttcaagcgctttgaggccaaaggcagaaaaggaaatatcttcgtataaaaactagagagaatcattctcagaaagtgctctgcgatgtgtgcgttcaactctcagagtttaacttttcttttcattcagcagtttggaaacactctgtttgtaaagtctgcacgtggatattttgaccacttagaggccttcgttggaaacgggtttttttcttgtaaggctagacagaagaattcccagtaacttccttgtgttgtgtgcattcaactcacagagttgaacgttcccttagacagagcagatttgaaacactctatttgtgtaatttgcaagtgtagatttcaagcgctttaaggtcaacggcagaaaaggaaatatcttcgtttcaaaactagacagaaatcattcccacaaactgcgttgtgatgtgttcgttcaactcacagtgtttaacctttcttttcatagagcaggtaggaaccagtctgtttgtaaattctgtaagtggatattctgacatcttgtggccttcgttggaaacggggtttcttcatattttgctagacagaagaattctcagtaacttccttgtgttgtgtttattcaactcacagagttgaatgctcctttacacagagcagacttgaaacactctttttgtggaatttgcaagtggagatttcagaggctttgaggtcaatggtagaaaagtaaatatcttcgtataaagactagacagaatgattctcagaaactcctttgtgatgtgtgcgttcaaatcacagagtttaacttttcttttcatagagcagttaggaaacactctgtttgtaaagtgtgcaagtggatattcagacctctttgaggccttcgttggaaacgggatttcttcatattatgctagacagaagaattctcagtaacttcccttgtgttgtgtgtattcaactcacagagttgaacgatcctttacacagagcagacttgaaacactctttttgtggaatttgcaagaggagatttcagccgctttgaggtcaatagtagaaaaggaaacatcttcgtagaaaaactagacagaatgattctcagaaactcctttgtgatgtgtgcgttcaactcacagagtttaactttccttttcatagagcagttaggaaacactctgtttgtaaagtctgcaagtggatattcagacctctttgaggccttcgttggaaacgggatttcttcatattctgctagacagaagaattcccagtaagttccttgtgttgtgtgtgttcaactcacagagttgaactttcatttacacagagcagatttgaaacactctttttgtggaatttgcaagtggagatttcaagcgctttgaggccaaaggcagaaaaggaaatgtcttcgtttcaaaactagacagaatcattctcagaaactgctgcgtgatgtgtgcgttcaactctcagagtttaacttttcttttcattcagcggtttggaaacactctgtttgtaaagtctgcacgtggatattttgaccccttagaggccttcgttggaaacgggtttttttcatgtaaggctagacagaagaattctcagtaagttccttgtgttgagtgttttcaactcacagagttgaacgatgctttacacagagtagacttgaaacactcttgttgtggaatttgcaagtggagatttcagccgctttgaggtcaatggtagaataggaaatatcttcctatagaaactagacagaatgattctcagaaactcctttgtgatgtgtgcattcaactcacagagtttaacctttcttttcatagagcagttaggaaacattctgtttgtaaagtctgcaagtggatattcagacctctttgaggacttcgttggaaacgggattttttcatattatgctagacagaagaattctcagtaacttccttgtgttgtgtgtattcaactcacagagttgaacgatcctttacacagagcagacttgaaacactcttgttggggaatttgcaagtggagatttcagccgctttgaggtcaatggtagaaaaggaaatatcttcctataaaaactagacagaatgattctcagaaactcctttgtgatgtgtgcgttcaactcacagagtttaacctttctgttcatagagcagttaggaaacactctgtttgtaaagtctgtaagtggatattcagacctccttgaggccttcgttggaaacgggatttcttcatattctgctagacagaagaattcccagtaacttccatgtgttgtgtgtgttcaactcacagagttgaaatttcatttacacagagcagatttgaaacactctttttgtggaatttgcaaatggagatttcaagcgctttgaggccagaggcagaaaaggaaatatcttcgtataaaaactagacagaatcattctcagaaactgctctgcgatgtgtgcgttcaactctcagagtttaacttttcttttcattcagcagtttggaaacactctgtttgtaaagtctgcacgtggataatttgaccacttagaggtcttcgttggaaacgggtttttttcatgtaaggctagacagaagaattcccagtaacttccttgtgttgtgtgcattcaactcacagagttgaacgttcccttagacagagcagatttgaaacactctatttgtgcaatttacaagtgtagatttcaagcgctttaaggtcaatggcagaaaaggaaatatcttcgtttcaaaactagacagaatgattctcataaactcctttgtgatgtgtgcgttcaacacacagagtttaacttttcttttcatagagcagttaggaaacactctgtttgtaaagtctgcaagtggatattcagacctctttgaggccttcgttggaaacgggatttcttcatattctgctagacagaagaattctcagtaacttccttgtgttgtgtgtattcaactcacagagttgaacgatcctttacagagagcagactttaaacactctttttgtggaatttgcaagtggagatttcagccgctttgaggtcaatggtagaaaaggaaatatcttcgtataaagactagacagaatgattctcataaactcctttgtgatgtgtgcgttcaactcacagagtttaacctttcttttcatagagcagttaggaaacactctgtttgtaaagtctgcaagtggatattcagacctccttgaggccttggttggaaacgggatttcttcatattctgcttgacagaagaattctcagtaacttccttgttttgtgtgtattcaactcacagagttgaacgatcctttacacagagcagacttgaaacactctttttgtggaatttgcaagtggagatttcagccgcgttgaggtcaatggtagaaaaggaaatatcttcgtataaaaactagacagaatgattctcagaaactcctttgtgatgtgtgcgttcaactcacagagtttaacctttcttttcatagagcagttgggaaacactgtttgtaaagtctgcaagtggatattcagacatccttgaggctttcgttggaaacgggatttcttcatattctgctagaaagaagaattctcagtaacttccttgtgttgtgtgtattcaactcacagagttgaacgatcctttacagagagcagacttgaaacactctttttgtggaatttgcaagtggagatttcagccgctttgaggtcaacggtagaaaaggaaatatcttcgtataaagactagacagaatgattctcagaaactcctttgtgatgtgtgcgttcaacacacagagtttaacttttcttttcatagagcagttaggaaatactctgtttgtaaagtctgcaagtggatattcagacctctttgaggccttcgttggaaacggaatttcttcatattatgctagacagaagaattctcagtaacttccttgtgttgtgtgtattcaactgacagagttgaactttcttttagagagagcagatttgaaacactgtttttgtggaatttgcaactggagatttcaagcgctttggggccaaaggcagaaaaggaaatatcttcgtataaaaactagacagaatcgttctcagaaactgctctgcgatgtgtgcgttcaactctcagagtttaacttttcttttcattcagcagtttggaaacactctgtttgtaaagtctgcacgtggataatttgaccacttagaggccttcgttggaaacgggtttttttcatgtaaggctagacagaataattcccagtaacttccttgtgttgtgtacattcaactcacagagttgaacgttcccttagagagagcagatttgaaactctctttttgtgaaattagcaagtggagatttcaagggctttaaggtcaatggcagaaaaggaaatatcttcgtttcaaaactagacagaatgattctcataaactcctttgtgatgtgtgcgttcaactcacagagtttaacctttctttccatagagcagttgggaaacactctgtttgtaatgtctgcaagtggatattcagacttccttgaggccttcgttggaaacgggatttcttcatattctgctagacagaagaattctcagtaacttccttgtgttgtgtgtattcaactcacagagttgaatgatcctttacacagagcagacttgaaacactctttttgtggaatttgcaagtggagatttcacccgctttgaggtcaacgggagaaaaggaaactatcttcgtataaagactagacagaatgattctcagaaactcctttgtgatgtgggcgttcaactcacagagtttaaccttccttttcatagagcagttaggaaacactctgtttgtaatgtctacacgtggatatttggatttctttgaggccttcgttggaaacgggattttttcatgtaaggctagacggaagaattctcagtaacttccttgtgttgtgtgtattcaactgacagagttgaactttcatttagagagagtagatttgaaacactgtttttgtggaatttgcaagtggagatttcaagcgctttggggccaaaggcagaaaaggaaatatcttcgtataaaaactagacagaatcattctcagaaaccgctctgtgatgtgtgcgttcaactctcagagtttaacttttctttccattcagcagtttggaaacactctgtttgtaaagtctgcacgtggatattttgaccacttagaggtcttcgttggaaacgggtttttttcatgtaaggctagacagaagaattcccagtaacttcccttgtgttgtgtgcattcaactcacagagatgaacgttcccttagacagagcagatttgaaacactctatttgtgcaatttgcaagtgtagatttcaagcgctttaaggtcaatggcagaaaaggaaatatcttcgtttcaaaactagacagaatcattcccacaaactgcgttgtgatgtgttcgttcaactcacagagtttaaactttctgttcatagagcagttaggaaacactctgtttgtaaagtctgtaagtggatattccgacatcttttggccttctttggaaacgggatttcttcatattctgctagacagaagaattctcagtaacttccttgtgttgtgtttattcaactcacagagttgaatgatcctttacacagagcagacttgaaacactctttttgtggaatttgcaagtggagatttcagccgctttgtggtcaatggtagaaaaggaaatatcttcctataaagactagacagaatgattctcagaaactcctttgtgatgtgttcgttcaactcacagagtttaacctttcttttcatagaggagttaggaaacactctgtttgtaaagtctgcaagtggatattcagacctctttgaggccttcgttggaaacgggtttttttcatataaggctagacagaagaattctcagtaacttcccttgtgttgtgtgtattcaactgacagagttgaactttcatttagagagagcagatttgaaactctgtttttgtggaatttgcaagtggagatttcaagcgctttggggccaaaggcagaaaaggaaatatcttcgtataaaaactagacagaatcattctcagaaactgctctgcgatgtgtgcgttcaactctcagagtttaacttttcttttcattcagcagtttggaaacactctgtttgtaaagtctgcacgtggataatttgaccacttagaggccttcgttggaaacgggtttttttcatgtaaggctatacagaagaattataagtaacttccttgtgttgtgtgtattcaactcacagagttgaacgatcctttacacagagcagacttgaaacactctttttgtggaatttgcaagtggagatttcagccgctgtgaggtcaatggtagaataggacatatcttcctatagaaactagacagaatgattctcagaaactcctttgtgatgtgtgcgttcaactcacacagtttaacctttcttttcatagagcagttaggaaacactctgtttgtaaagtctgcaagtggatatacagacctccttgaggcattcgttggaaacgggatttcttcatattatgctagacagaagaattctcagtaacttccttgtgttgtgtgtattcaactgacagagttgaactttcatttagagagagcagatttgaaacactgtttttgtggaatttgcaagtggagatttcaagcgctttggggccaaaggcagaaaaggaaatatcatcgtataaaaactagacagaatcattctcagaaactgctgagtgatgtgtgcgttcaactctcagagtttaacttttcttttcattcagcggtttggaaacactctgtttgtaaagtctgcacgtggatattttgaccacttagaggccttcgttggaaacgggtttttttcatgtaaggctagacagaagaattcccagtaacttccttgtgttgtgtacattcaactcacagagttgaacgttcccttagacagagcagatttgaaacagtctttttgtgcaattggcaagtggtgatttcagccgctttgtggtcaatggtataaaaggaaatatcttcgtataaaaactagacagaatcattcccacaaactgcgttgggatgtgttcgttcaactcacagagtttaacctttctgttcatagagcagttaggaaacactctgtttgtaaagtctgtaagtggatattctgacatcttgtggccttcgttggaaacgggatttcttcatattctgctagacagaagaattctcagtaacttccttgtgttgtgtgtattcaactcacagagttgaacgatcctttacacagagcagacttgaaacactctttttgtggaatttgcaagtggagatttcagccgcgttgaggtcaatggtagaaaaggaaataacttcgtataaaaactagacagaatgattctcagaaactcctttgtgatgtgtgcgttcaactcacagagtttaacttttcttttcatagagcagttaggaaacactctgtttgtaaagtctgcaagtggatattcagacctccttgaggccttcgttggaaacaggatttcttcatattctgctagacagaagaattctcagtaacttccttgtgttgtgtgtattcaactgacagagttgaactttcatttagagagagcagatttgaaacactgtttttgtggaatttgcaagtggagatttcaagcgctttggggccaaggacagaaaaggaaatatcttcgtataaaaactagacagaatcattctcagaaactgctgcgtgatgtgtgcgttcaactctcagagtttaacttttcttttcattcagcggtttggaaacactctgtttgtaaagtctgcacgtggatattttgaccacttagtggccttcgttggaaacgggttttttttcatgtaaggctagacagaagaattcccagtaacttccttgtgttgtgtacattcaactcacagagttgaacgttcccttagacagagcagatttgaaacactctttttgagaaattggcaagtggagatttcaagcgctttaaggtcaatggcagaaaaggaaatatcttcgtttcaaaactagacagaatcattcccacaaactgcgttgtgatgtgttcgttcaactcacagagtttaaccgttcttttcatagagcagttaggaaacactctgtttgtaaattctgtaagtggatattctgacatcttgtggccttcgttggaaacgggatttcttcatgttctgctagacagaagaattctcagtaacttccttttattgtgtgtattcaactcacagagttgaacgatcctttacacagagcagacttgaaacactctttttgtggaatttgcaagtggagatttcagccgctttgaggtcaatggtagaaaaggaaatatcttcgtataaaaattagacagaatgattctcagaaactcctttgtgatgtgtgcgttcaactcacagagtttaacctttcttttcatagagcagttaggaaacactctgtttgtaaagtctgcaagtggatattcagacctctttgaggccttcgttggaaacgggtttttttcatataagggtagacaaaagaattaccactaacatccttgtgttgtgtgtgttcaactcacagagttgaactttcatttacacagagcagatttgaaagactctttttgtggaatttgcaaatggagatttcaagcgctttgaggccaaagacagaaaaggaaatatcttcgtttcaaaactagacagaatcattctcagaaactgctctgcgatgtgtgcgttcaactctcagagtttaacttttcttttcattcagcagtttggaaacactctgtttgtaaagtctgcacgtggataacttgaccacttagaggccttcgttggaaacgggttttattcacgtaaggctagacagaagatttcccagtaaattccttgtgttgtgtacattcaactcacagagttgaacgttcccttagacagagcagatttgaaacactctttttgtgcaattgggaagtggagatttcaagcgctttaaggtcaatggcagaaaaggaaatatcttcgtttcaaaactacacagaatcattcccacaaactgcgttgtgatgtgttcgttcatctcacagagtttaacctttcttttcatagagcagttaggaaacagtctgtttgtaaattctgtaagtggatatcctgacatcttgtggccttcgttggaaacgggatttcttcatattctgctagacagaagaattctcagaaacttccttgtgttgtgtgtattcaactcacagagttgaacgatagtttacacagagcagacttgaaacactctttttgtggaatttgcaagtggagatttcagccgctttgaggtcaatgttagaaaaggaaatatcttcgtataaaaactagacagaatgattctcagaaacttctttgtgatgtgtgcgttcaactcacagagtttaacctttctgttcatagagcagttaggaaacactctgtttgtaaactctgcaagtggatattcagacctcctttgaggccttcgttggaaacgggatttctccatactgtgctagacagaagaattcccagtaacttccttctgttgtgtgtgttcaactcacagagttgaactttcatttacacagagcagatttgaaacactctttttgtggaatttgcaaatggagatttcaagcgctttgaggccaaaggcagaaaaggaaatatcttcgtttcaaaactagacagaatcattctcagaaactgctctgcgatgtgtgcgttcaactctcagagtttaacttttcttttcattcagcagtttggaaacactctgtttgtaaagtctgcacgtggataatttgaccacttagaggccttcgttggaaacggggttttttcatgtaaggctagacagaagaattctcagtaacttccttgtgttgtgtgtactcaactcacagagttgaacgatcctttacacagagaggacttgaaacactctttttgtggaatttgcaagtggagatttcagccgcgttgaggtcaatggtagaaaaggaaatatcttcgtataaaaactagacacaatgattctcagaaacgcctttgtgatgtgtgtgttcaactcacagagtttaacctttcttttcatagagcagttaggaaacactctgttggtaaagtctgcaagtggatattcagacctctttgaggccttcgttggaaacgggtttttttcatataaggctagacagaagaattctcagtaactttccttgtgttgtgtgtattcaactgacagagttgaactttcatttagagagagcagatttgaaacactgtttttgtggaatttgcaagtggagatttcagccgctttgaggtcaatagtagaaaaggaaatatcttcgtagaaaaactagacagaatgattctcagaaacttctttgtgatgtgtgcgttcaactcacagagtttaacctttcttttcatagagcagttaggaaacactctgtttgtaaactctgcaagtggatattcagacctctttgaggccttcgttggaaacaggatttcttcatactatgctagacagaagaattctcagtaacttccttgtgttgtgtgtattaaactcacagagttgaacgatcctttacacagagcagacttgaaacactctttttttggaatttgcaagtggagatttcagccgctttgaggtcaatggtagaataggaaatatcttcctatagaaactagacagaatgattctcagaaacttctttgtgatgtgtgcgttcaactcacagagtttaacctttctttacatagagcagttaggaaacactctgtttgtaaactctgcaattggatattcagacctctttgaggccttcgttggaaacgggatttcttcatactatgttagacagaagaattcccagtaactttccttgtgttgtgtgtattcaactcacagagttgaactttcatttacacagagcagattggaaacactctttttgtggaatttgcaagtggagatttcaagcgctttgaggccaaatgcagaaaaggaaatatcttcgtataaaaactagacagaatcattctcagaaactgctctgcgatgtgtgcgttcaactctcagagtttaacttttcttttcattcagcagtttggaaacactctgtttgtaacgtctgcacgtggatattttgaccacttagaggccttcgttggaaacgggtttttttcatataaggctagacagaagaattcccagtaacttccttgtgttgtgtacattcaattcacagatttgaaggttcccttagacacagcagatttgaaacactctttttgtgcaattggcaagtggagatttcaagcgctttaaggtcaatggcagaaaagggaatatcgtcgtttcaaaactagacagaatcattcccacaaactgcgttgtgatgtgttcgttcaactcacagagtttaacctttctcttcatagagcagttaggaaacactctgtaaagtctgtaagtggatattctgacatcttgtggccttcgttggaaacgggatttcttcatattctgctagacagaagaattcccagtaacttccttgtgttgtgtgtattcaactcacagagttgaacgatcctttacacagagcagacttgtaacactctttttctggaatttgcaagtggagatttcagccgctttgaagtcaaaggtagaaaaggaaatatcttcctataaaaactagacagaatgattctcagaaactcctttgtgatgtgtgtgttcaactcacagagtttaacctttcttttcatagagcagttaggaaacactctgtttgtaaagtctgcaagtggatattcagacctctttgagaccttcgttggaaacgggattttttcatataaggctagacagaagaattcccagtaacttccttgtgttgtgtgtgttcaactcacagagttgaactttcatttacacagagcagatttgaaacactctttttgtggaatttgcaaatggagatttcaagcgcattgaggccaaaggcagaaaaggaaatatcttcgtataaaaactagacagaatcattctcagaaactgctgcgtgatgcgtgcgttcaactctcaaagtttaacttttcttttcattcagcggtttggaaacactctgtttgtaaagtctgcacgtggatattttgaccacttagaggccttcgttggaaacgggtttttttcatgtaaggctagacagaagaattcccagtaacttccttgtgttgtgtacattcaactcacagagttgaacgttcccttagacagagcagatttgaaacactctttttgtgcaattggcaagtggtgatttcagcctctttgaggtcaatggtagaaaaggaaatatcttcgtataaaaactagacagaatcattcccacaaactgcgttgttatgtgttcgttcaactcacagagtttaacctttcttttcatagagcagttaggaaacagtctgtttgtaaattctgtaagtggatattctgacatcttgtggccttcgttggaaacgggatttcttcatattctgctagacagaataattctcagtaacttccttgtgttgtgtgtattcaactcacagagttgaacgatgctttacacagagcagacttgaaacattctttttgtggaatttgcaactggagatttcagccgctttgaggtcaatggtagaataggaaacatcttcctatagaaactagacagaatgattctcagaaactcctttgtgatgtgtgtgttcaactcacagagtttaacctttcttttcatagagcagttaggaaacactctgtttgtaaagtctgcaagtggatattcagacctctttgaggccttcgttggaaacgggttttttcatataaggctagacagaagaattcccagtaacttccttgtgttgtgtgtgttcaactcacagagttgaactttcatttacacagagcagatttgaaacactctttttgtggaatttgcaggtggagatttcaagcgctttgaggccaaaggcagaaaaggaaatatcttcatataaaaactagacagaatcattctcagaaactgctctgcgatgtgtgcgttcaactctcagagtttaacttttcttttcattcagcagtttggaaacaatctgtttgtaaagtctgcacgtggataacttgaccacttagaggacttcgttggaaacgggtttttttcctgtaaggctagacagaagaattcccagtaacttccttgtgttgtgtacattcaactcacagagttgaacgttcccttagacagagcagatttgaaacactctttttgtgcaattggcaaatggagatttcaagcgctttaaggtcaatggcagaaaaggaaatattcttcgtttcaaaactagacagaatcattcccacaaactgcgttgtgatgtgttcgttcaactcacagagtttaacctttctgttcatagagcagttaggaaacacactgtttgtaaagtctgtaagtggatattctgacatcttgtggccttcgttggaaacgggatttcttcatattctgctagacagaaagaattctcagtaacttccttgtgttgtgtgtattcaactcacagagttgaacgatcctttacacagagcagacttgaaacactctttttgtggaatttgcaagtggagatttcagccgctttgaggtcaatggtagaataggaaatatcttcctatagaaactagacagatgattctcagaaactcctttgtgatgtgtgcgttcaactcacagagtttaacctttcttttcatagagcagttaggaaacactctgtttgtaaagtctgcaggtggatattcagacatccttgaggctttcgttggaaacgggatttcttcatattctgctagaaagaagaattctcagtaacttcattgtgttgtgtgtattcaactcacagagttcaacgatcctttacacagagcagacttgaaacactctttttgtggaatttgcaagtggagatttcagccgctttgaggtcaatggtagaaaaggaaatatcttcctataaaaactagacagaatgattctcagaaactcctatgtgatgtgttcgttcagctcacagagtttaacctttcttttcatagagcagttaggaaacactctgtttgtaaagtctgcaagtggatatttagacctctttgaggccttcgttcgaaacgggatttcttcatattctgctagagagaagaattctcagtaacttcccttgtgttgtgtgtattcaactcacagagttgaacgatcctttacacagagcagacttgaaacactctttttgcggaatttgtaagtggagatttcagccgctttgaggtcaatggtagaaaaggaattatcttcgtataaaaactagacagaatgattctcagaaactcctttgtgatgtgtgcgttcaactcacagagtttaacctttcttttcatagagcagttaggaaacactctgtttgtacagtctgcaagtggatattcagacatccttgaggctttcgttggaaacgggatttcttcatattctgctagaaagaagaattctcagtaacttccttgtgttgtgtgtattcaactgacagagttgaactttcatttagagagagcagatttgaaacactgtttttgtggaatttgcaagtggagatttcaagcgctttggggccaaaggcagaaaaggaaatatcttcgtataaagactagacagaatgattctcagaaacttcattgtgatgtgtgcgttcaactcacagagtttaaccgttcttttcatagagcagttaggaaacactctgtttgtaaactctgcaagtggatattcagacctctttgaggccttcgttggaaacggtatttcttcatactgtgctagacagaagaatactcagtaacttccttgtgttgtgtgtattcaactcacagagttgaacgatggtttacacagagcagatttgaaacactctttttgtggaattagcaattggagatttcagccgctttgaggtcaatggtagaaaaggaaatatcttcgtataaaaactagacagaatgattctcagaaactcctttgtgatgtgtgcgttcaactcacagagtttaacctttcttttcatagagcagttaggaaacactctgtttgtaaagtctgcaagtggatattcagacctctttgaggccttcgttggaaacgggtttttttcatataagtctagacagaagaattcccagtaacttccttgtgttgtgtgtgttcaaatcacagagttgaactttcatttacacagagcagatttgaaacactctttttgtggaatttgcaagtggagatttcaagcgctttggggccaaaggcagaaaaggaaatatcttcgtttcaaaactagacagaatcattctcagaaactgctgcgtgatgtgtgcgttcaactctcagagtttaacttttcttttcattcagcggtttggaaacactctgtttgtaaagtctgcacgtggaaattttgaccactcagaggccttcgttggaaacgggtttttttcatgtaaggctagacagaagaattccaagtaacttccttgtgttgtgtgcattcaactcacagagttgaacgttcccttagacagagcagatttgaaacactctatttgtgcaatttgcaagtgtagatttcaagcgctttaaggtcaatggcagaaaaggaaatatcttcgtttcaaaactagacagaatcattcccacaaactgcgttgtgatgtgttcgttcaactcacagagtttaacctttctgttcatagagcagttaggaaacactctgtttgtaaagtctgaaagtgcatattctgacatcttgtggccttcgttggaaacgggatttcttcatattctgctagatagaagaattctcagtaacttccttgtgttgtgtgtattcaactcacagagttgaacgatccctttacacagagcagacttgaaacactctttttgtggaatttgcaagtggagatttcagccgctttgaggtcaatagtcgaaaaggaaatatcttcgtagaaaaactagacagaacgattctcagaaactcctttgtgatgtgtgcgttcaactcacagagtttaacctttcttttcatagagcagttaggaaacactctgtttgtaaagtctgcaagtggatattcagacctctttgaggccttcattggaaacgggatttcttcatattctgctagacagaagaattcccagtaacttccttgtgttgtgtgtgttcaactcacagagttgaactttgatttacacagagcagatttgaaacactctttttgtggaatttgcaagtggagatttcaagcgctgtgaggccaaaggcagaaaaggaaatatcttcgtataaaaactagacagaatcattctcagaaactgctctgcgatgtgtgcgttgaactctcagagtttaacttttcttttcattcagcagtttggaaacactctgtttgtaaagtctgcacgtggatattttcaccacttagaggccttcgttggaaacgggtttttttcctgtaaggctagacagaagaattcccagtaacttccttgtgttgtgtgcattcaactcacagagttgaacgttcccttagacagagcagatttgaaacactctctttgtgcaatttgcaagtgtagatttcaagcgctttaaggtcaacggcagaaaaggaaatatcttcgtttcaaaactagacagaatcattcccacaaacttcgttgtgatgtgttcgttcaactcacagagtttaaccttcctgttcatagagcagttaggaaacactctgtttgtaaagtctgtaagtggatattctgacatcttgtggccttcgttggaaacgggatttcttcatattctgctagacagaagaattctcagtaacttccttgtgttgtgtgtattcaactcacagagttgaacgatcctttacacagagcagacttgaaacactctttttgtggaatttgcaagtggagatttcagccgcgttgaggtcaatggtagaaaaggaaatatcttcatataaaaactagacagaatgattctcagaaactcctttgtgatgtgtgtgttcaactcacacagtttaacctttcttttcatagagcagttagtaaacactctgtttataaagtctgcaagtggatattcagacccctttgaggccttcgttggaaacgggatttcttcatattatgctagacagaagaattcccagtaacttccttgtgttgtgtgtgttcaactcacagagttgaactttcatttacccagagcagatttgaaacactctttttgtggaatttgcaagtggagatttcaagcgctttgaggccaaaggcagaaaaggtaatatcttcgtataaaaactagacagaacgattctcagaaactcctttgtgatgtgtgcgttcaactcacagagtttaacttttcttttcatagagccattaggaaacactctgtttgtaaagtctgcaagtggatactcagacctctttgaggccttcgttggaaacgggtttttttcatgtaaggctagacagaagaattcccagtaacttccttgtgttgtgtgcattcaactcacagagttgaacgttcccttagacagagcagatttgaaacactctatttgtgcaatttgcaagtatagatttcaagcgctttcaggtcaacggcagaaaaggaaatatcttcgtttcaaaactagacagaatcattcccaaaaactgcgttgtgatgtgttcgttcatctcacagagtttaacctttcttttcatagagcagttaggaaacagtctgtttgtaaattctgtaagtggatattctgacatcttgtggccttcgatggaaacgggatttcttcatattctgctagacagaagaattctcagtaacttccttgtgttgtgtgtattcaactcacagagttgaacgatcctttacacagagcagacttgaaacattctttttgtggaatttggaagtggagatttcagccgctttgaggtcaatggtagaatagggaatatcttcctatagaaactagacagaatgattcccacaaaatcctttgtgatgtgtgtgttcaactcacagagtttaacctttcttttcatagagcagttagtaaacactctgtttataaagtctgcaagtggatattcagacccctttgaggccttcgttggaaacgggatttcttcatattatgctagacagaagaattctcagtaacttccttgtgttgtgtgtattcaactgacagagttgaactttcatttagagagagcagatttgaaacactgtttttgtggaatttgcaagtggagatttcaagcgctttggggtcaaaggcagacaacgaaatatcttcgtataaaaactagacagaatcatgctcagaaactgctctgcgatgtgtgccttcagctctcagagtttaacttttcttttcattcagcagtttggaaacactctgtttgtaaagcctgcacgtggatattttgaccacttagaggtcttcgttggaaacgggtttttgtcatgtaaggctagacagaagaattaccagtaacttccttgtgttgtgtgcattcaactcacagagatgaacgttcccttagacagagcagatttgaaacactctatttgtgcaatttgcaagtgtagatttcaagcgcttaaaggtcaatggtagaaaaggaaatatcttcgtttcaaaactagacagaatcattcccacaaactgcgttgtgatgtgttcgttcaactcacagagtttaacctttctgttcatagagcagttaggaaacactctgtttgtaaagtctgtaagtggatattctgacatcttgtggccttcgttggaaacgggatttcttcgtattgtgctagacagaagaattctcagtaacttccttgtgttgtgtgtattcaactcacagagttgaacgatcctttacacagagcggacttgtaacattctttttgtggaatttgcaagtggagatttcagccgctttgaagtcaaaggtagaaaaggaaatatcttcctataaaaactagacagaatgattctcagaaactcctttgtgatgtgtgcattcaactcacagagtttaacctttcttttcatagaacagttaggaaacactctgtttgtaaagtcttcaggtggatattcagacctcttagaggccttcgttggaaacaggatttcttcatataatgctagacagaagaattctcagtaacttcattgtattgtgtgtattcaactcacagatttcaacgatcctttacacagagcagacttgaaacactctttttctggaatttgcaagtggagatttcagccgctttgaggtcaatggtagaataggaaatatcttcctatagaaactagacagaatgattctcagaaactcctttgtgatgtgtgcgttcaactcacagagtttaacctttcttttcatagagcagttaggaaacactctgtttgtagagtctgcaagttgatattcagacctccttgaggccttcgttggaaacgggatttcttcatattatgctagacagaagaattcccagtaacttccttgtgttgtgtacattcaactcacagagttgaacgttcccttagacagagcagacttgtaacacactttttgtggaatttgcaagtggagatttcagccgctttgaagtcaaaggtagaaaaggaaatatcttcctataaaaactagacagaatgattctcagaaactcctttgtgatgtgtgcgttcaactcacagagtttaacctttcttttcatagaggagttaggaaacactctgtttgtaaagtctgcaagtggatattcagacctccttgaggcctttgttggaaacgggatttcttcatatcctgctagacagaagaattctcagtaacttccttgtgttgtgtgtattcaactcacagagttgaacgatcctttacagagagcagacttgaaacactctttttgtggaatttgcaagtggagatttcagccgctttgagatcaatggtagaataggaaatatcttcctatagaaactagacagaatcattctcaaaaactgctgcgtgatgtttgcgttcaactctcagagtttaacttttcttttcattcagcggtttggaaacactctgtttgtaaagtctgcacgtggatattttgaccacttagaggccttcgttggaaacgggtttttttcatgtaaggctagacagaagaattcccagtaacttccttgtgttgtgtgcattcaactcacagagttgaacgtttccttagacagagcagatttgaaacactctatttgtgcaatttgcaagtgtagatttcaagcgctttaaggtcaatggcagaaaaggaaatatcttcgtttcaaaactagacagaatcattcccaaaaactgcgttgtgatgtgttcgttcaactcacagagtttaacctttctgttcatagagcagttaggaaacactctgtttgtaaagtctgtaagtagatattctgacatcttgtggccttcgttggaaacgggatttcttcatattctgctagacagaaagaattctcagtaacttccttgtgttgtgtgtattcaactcacagagttgaacgatcctttacacagagcagacttgaaacactctatttgtggaatttgcaagtggagatttcagccgctttgaggtcaatgatagaaaaggaaatatcttcgtataaaaactagacagaatgattctcataaactcctttgtgaagtgtgcgttcaactcacagagtttaacctttcttttcatagagcagttaggaaacactctgtttgttaagtctgtaagtggatattcagacctccttgaggccttcgttggaaacgggatttcttcatattatgctagacagaagaattctcagaatcttccttgtgttgtgtgtattcaactcacagagttgaacgatggtttacacagagcagatttgaaacactctttttgtggaatttgcaagtggagatttcagccgctttgaggtcaatggtagaaaatgaaatatccttcgtataaaaactagacagaatgattctcagaaaatcttttgtgatgtgtgcgttcaactcacagagtttaacttttcttctcatagagcagttaggaaacactctgtttgtaaagtctgcaagtggatattcagacctccttgaggccttcgttggaaacgggatttcttcatattatgctaaacagaagaattcccagtaacttccttgtgttgtgtgtattcaactcacagagttgaactttcatttacacagagcagattggaaacactctttttgtggaatttgcaagtggagatttcaagcgctttgaggccaaaggcagaaaaggaaatatcttcgtataaaaactagacagaatcattctcagaaactgctctgcgatgtgtgccttcagcgctcagagtttaacttttcttttcattcagcagtttggaaacactctgtttgtaaagtctgcacgtggatattttgaccacttagaggccttcgttgcaagcgggtttttgtcatgtaaggttagacagaagaattcccagtaacttccttgtgttgtatacattcaactcacagagttgaacgttcccttagacagagcagatttgaaacactctttttgtgcaattggcaagtggagatttcaagcgctttgaggtcaatggcagaaaaggaaatatcttcgtttcaaaactagacagaatgattctcagaaactcctttgtgatgtgtgcgttcaactcacagagtttaacctttctattcatagagcagttaggaaacactctgtttgtaaagtctgcaagtggatattcagacatccttgaggctttcgttggaaacgggatttcttcatattctgctagaaagaagaattctcagaaacttccttgtgttgtgtgtattcaactcacagagttgaacgatcctttacacagagcagacttgaaacactctttttgtggaatttgcaagtggagatttcagccgctttgaggtcaatggtagaaaaggaaatatcttcgtataaaaactagacagaatgattctcagaaactcctttgagatgtgtgtgttcaactcacagagtttaacccttcttttcatagagcagttaggaaacactctgtttgtaaagtctgcaagtggatattcagacctctttgaggccttcgttggaaaccggatttcttcatactgtgctagacagaagaattcccagtaacttccttgtgttgtgtgtgttcaactcacagagttgaacttccatttacacagagcagatttgaaacactctttttgtggaatttgcaagtggagatttcaagcactttgaggccaaaggcagaaaaggaaatatcttcgtttcaaaactagacagaatgattctcagaaactcctttgtgatgtgtgcgttcaactcacagagtttaacctttcttttcatagagcagttaggaaacactctggttgtaaagtctgcaagtggatattttgaccacttagaggccttcgttggaaacgggttttttttcatgtaagactagacagaagaattctcagaaacttccttgtgttgtgtgttttcaactcacagagttgaacgatgctttacacagagtagacttgaaacactctttttgtggaatttgcaagtggagatttcagccgctttgaggtcaatggtagaaaaggaaatatctttgtataaaaactagacagaatgattctcagaaactcctttgtgatgtgtgcgttcaactcacagagtttaacctttcttttcatagagcagttaggaaacactctgtttgtaaagtgtgcaagtggatattcagacctctttgaggccttcgttggaaacgggatttcttcatattctgctagagagaagaattctcagtaacttccttgtgatgtgtgtattcaactcacagagttcaacgatcctttacacagagcagacttgaaacactctttttgtggaatttgcaagtggagatttcagccgctttgaggtcaatggtagaataggaaatatcttcctatagaaactagacagaatgattctcagaaactcctttgtgatgtgtgtgttcaactcacagagtttaacctttcttttcatagagcagttagtaaacactctatttataaagtctgcaattggatattcagacccctttgaggccttcgttggaaacgggatttcttcatattatgttagacagaagaattcccagtaacttccttgtgttgtgtgtgttcaactcacagagttgaactttcatttccacagagcagatttgaaacactctttttgtggaatttgcaaatggagatttcaagcgctttgaggccaaaggcagaaaaggatatatcttcgtataaaaactagacagaatcattctcagaaactgctctgcgatgtgtgcgttcaactctcagagtttaacttttcttttcattcagcagtttcgaaacactctgtttgtaaagtctgcacgtggataatttgaccacttagaggccttcgttggaaacgggtttttttcatgtaaggatagacagaagaattcccagtaacttccttgtgttgtgtacattcaactcacagagttgaacgttcccttagacagagcagatttgaaacactctttttgtgcaactggcaagtggagatttcaagcgctttgaggtcaatggcagaaaaggaaatatcttcgtttcaaaactagacagaatcattcccacaaactgcgttgtgatgtgttcgttcaactcacagactttaacctttcttttcatagagcagttaggaaacagtctgtttgtaaattctgtaagtggatattctgacatcttgtggccttcgttggaaacgggatttcttcatattctgctagacagaagaattctcagtaacttccttgtgttgtgtgtattcaactcacagagttgaacgatcccttacacagagcagacttgaaacactctttttgtggaatttgcaagtggagatttcagccgctttgaggtcaatggtagaaaaggaaatatcttcgtataaaaactagacagaatgattctcagaaactcctttgtgatgtgtgtgttcaactcacagaatttaacctttcttttcatagagcagttagtaaacactctgtttataaagtctgcaagtggatattcagacccctttgaggccttcgttggaaacgggatttcttcatattatgctagacagaagaattctcagtaacttccctgtgttgtgtgtattcaactcacagagttgaacgatcctttacagagagcagacttgaaacactctttttgtggaatttgcaagtggagatttcagccgctttgaggtcaatggtagaataggaaatatcttcctatagaaactagacagaatgattctcagaaactcctttgtgatgtgtgcgttcaactcacagagtttaacctttcttttcatagagcagttaggacacactctgtttgtaaagtctgcaagtggatattcagacctctttgaggccttcgttggaaacgggatttcttcatattatgctagacagaagaattctcagtcacttccttgtgttgtgtgtattcaactgacagagttgaactttcatttagagagagcagatttgaaacactgtttttgtggaatttgcaagtggagatttcaagcgctttggggccaaaggcagaaaaggatatatcttcgtataaaaactggacagaatcattctcagaaactgctctgcgatgtgtgcgttcaactctcagagtttaacttttcttttcattcagcagtttggaaacactctgtttgtaaagtctgctcgttgataatttgaccacttagaggccttcgttggaaacgggtttttttcatataaggctagacagaagaattcccagtaacttccttgtgttgtgtgcattcaactcacagagttgaacgttcccttagacagagcagatttgaaacactctatttgtgcaatttgcaagtgtagatttcaagcgctttcaggtcaatggcagaaaaggaaatatcttcgtttcaaaactagacagaatcattcccacaaactgcgttgtgatgtgttcgttcaactcacagagtttaacctttcttttcatagagcagttaggaaacagtctgtttgtcaattctgtaagtggatattctgacatcttgtggccttcgttggaaacgggttttcttcatattctgctagacagaagaattctcagtaacttccttgtgttgtgtgtattcaactcacagagttcaacgatgctttacacagagtagattgaaacacacttttttttgaatttgcaagtggagatttcagccgctttgaggtcaatggtagaataggaaatatcttcctatagaaactagacagaatgattctcagaaacttctttgtgatgtgtgcgctcaactcacagagtttaacctttcttttcatagagcatttaggaaacactctgtttgtaaagtctgcaagtggatattcagacctctttgaggccttcgtaggaaacgggatttcttcatattatgctagacagaagaattcccagtaacatccttgtgttgtgtgtgttcaactcacagagttgaactttcatttacacagatcagatttgaaagactctttttgtggaatttgcaaatggagatttcaagcgctttgaggccaaaggcagaaaaggaaatatcttcgtataaaaactagacagaatcattctcagaaactgctctgcgatgtgtgcgttcaactgtcagagtttaacttttcttttcattcagcagtttggaaacactctggttgtaaagtctgcacgtggatattttgaccacttagaggccttcgttggaaacgggtttttttcctgtaaggctagacagaagatttcccagtaatttccttgtgttgtgtgcttcaactcacagaattgaacgttccgttagacagagcagatttgaaacactctatttgtgcaatttgcaagtgtagatttcaagcgctttaaggtcgttggcagaaaaggaaatatcttcgtttcaaaagtagacagaatgattctcagaaacttcattgtgatgtgtgtgttcaactcacagagtttaacctttcttttcatagagcagttgggaaacagtctgtttgtaaattctgtaagtggatattctgacatcttgtggccttcgttggaaacgggatttcttcatattctgctagacagaagaattctcagtaacttccttgtgttgtgtgtattcaacccacagagttgaacgatcctttacacagagcagacttgaaacactctttttctggaatttgcaagtggagatttcagccgctttgaggtcaatggtagaataggaaatatcttcctatagaaactagacagaatgattctcataaactactttgtgatgtgtgcgttcaactcacagagtttaacctttcttttcatagagcagttaggaaacactctgtttgtaaagtctgcaagtggatattcagacctctttgaggccttcgttggaaacgggatttcttcatattctgctagacagaagaattctcagtaacttccttgtgttgtgtgtattcaactcacagagttgaacgatcctttacacagagcattcttgaaacactctttttgtggaatttgcaagtggagatttcagccgctttgaggtcaatagtagaaaaggaaatatcttcgtagaaaaactagacagaaatcattctcagaaactgctgcgtgatgtgtgcgttcaactctcagagtttaacttttcttttcattcagcggtttggaaacactctgtttgtaaagtctgcaagtggatattttgaccacttagaggccttcgttggaaacgggtttttttcatgtaaggctagacagaagaattcccagtaacttccttgtgttgtgtgcattcaactcacagagttgaacgttcccttagacagagcagatttgaaacactctatttgtgcaatttgcaagtgtagatttcaagcgctttaaggtcaatggcagaaaaggaaatgtcttcgtttcaaaactagacagaatgattctcagaaacttcattgtgatgtgtgcgttcaactcacagagtttaacctttcttttcatagagcagttaggaaacactctgtttgtaaactctgcaagtggatattcagacctctttgctgccttcgttggaaacgggatttcttcatactgtgctagacagaagaattctcagtaacttccttgtgttgtgtgtatttaactcacaaaattgaacgatcctttacacagagcggacttgaaacactctttttgtgtaatttgcaagtggagatttcagccgcgttgaggtcaacggtagaaaaggaaatatcttcgtataaaaactagacagaatgattctcagaaactgctttgtgatgtgtgcgttcaactcacagagttcaacctttcttttcatagagcagttgggaaacactctgtttttaagtctgcaagtggatattcagacttctttgaggccttcgttggaagcgggatttcttcatgttctgctagacagaggaattcccagtaacttccttgtgctgtgtgtgttcaactcacagagttgaactttcatttacacagagcagatttgaaacactctttttgtggaatttgcaaatggagatttcaagcgctttgaggccaaaggcagaaaaggaaatatcttcgtttcaaaactagacagaatcattctcagaaactgctctgcgatgtgtgccttcaactctcagagtttaacttttcttttcattcagcagtttggaaacactctgtttgtaaagtctgcacgtggatattttgaccacttagaggccttcgttggaatcgggtttttttcctctaaggctagacagaagaattctcagaaacttccttgtgttgtgtgtattcaactcacagagttgaacgatcgtttacacagagcagacttgagacactctttttgtggaatttgtaagtggagatttcagccgctttgaggtcaatggtagaaatggaaatatcttcatataaaaactagacagaatcattcccacaaactgcgttgtgatgtgttcgttcaactcacagactttaacctttctgttcatagagcagttaggaaacactctgtttgtaaagtctgcaagtggatattcagacctccttgaggccttcgttggaaacgggatttcttcatattctgctagacagaagaattcccagtaacttccttgtgttgtgtgtgttcaactcacagagttgaactttcatttacacagcgcagatttgaaacactctttttgtggaatttgcaagtggagatttcaagcgctttgaggccaaaggcagaaaaggaaatatcttcgtataaaaactagacagaatcattctcagaaactgctgcgtgatgtgtgcgttcaactctcagagtttaactttgcttttcattcagcggtttggaaacactctgtttgtaaagtctgcacgtggatattttgaccacttagtggccttcgttggaaacgggtttttttcatgtaaggctagacagaagaattcccagtaacttccttgtgttgtgtacattcaactcacagagttgaacgttcccttagacagagcagatttgaaacactctttttgtgcaattggcaagtggagatttcaagcgctttgaggtcaatggcagaaaaggaaatatcttcgtttcaaaactagacagaatgattctcataaactcctttttgatgtgtgcgttcaacacacagagtttaacctttctgttcatagagcagttcggaaacactctgtttgtaaagtttgtaagtggatattctgacatcttgtggccttcgttggaaacgggatttcttcatattctgctagacagaagaattctcagaaacttccttgtgttgtgtgtattcaactcacagagttgaatgatcctttacacagagcagacttgaaacactctttttgtggaatttgcaagtggagatttcagccgctttgtggtcaatggtagaaaaggaaatatcttcgtataaagactagacagaatgattctgagaaactcctttgtgatgtgtgcgttcaactcacacagtttaacctttcttttcatagagcagttaggaaacactctgtttgtaaagtctgcaagtggatattcagacctccttgaggctttcgttggaaacgggatttcttcatattctgctagaaagaagaattctcagtaactgccttgtgttgtgtgtattcaactcacagagttgaacgatcctttacacagagcagacttgaaatactctttttgtggaatttgcaagtggagatttcagccgctttgaggtcaatggtagaataggaaatatcttcctatagaaactagacagaatgattctcagaaactcctttgtgatgtgtacgttcaactcacagagtttaacctttcttttcatagagcagttaggaaacactctgtttgtaaagtctgcaagtggatattcagacatctttgaggctttctttggaaacgggatttcttcatattctgctatacagaagaattctcagaaacttccttgtgttgtgtgttttcaactcacagagttcaacgatcctttacacagagtagacttgaaacactgtttttgtggaattggcaagtggagatttcagccgctatgaggtcaatggtagaaaaggaaatatcttcgtataaaaactagacagaatgattctcagaaactcctttgtgatgtgtgcgttcaactcacagagtttaacctttcttttcatagagcagttgggaaacactctttttgtaaagtctgcaagtggatattcagacatccttgaggctttccttggaaacgggatttcttcatattctgctagaaagaagaattctcagtaacttccttgtgttgtgtgtattcaactcacagagttgaatgatcctttacaaagaacagtcttgaaacactctttttgtggaatttgcaagtggagatttcagccgctttgaggtcaatggtagaataggaaatatcttcttatagaaactagacagaatgattctcagaaactactttgtgatgtgtgtgttcaactcacagagtttaacctttcttttcatagagcagttagtaaacactctgtttataaagtctgcaagtggatattccgacccctttgaggccttcgttggaaacgggatttcttcatattatgctagacagaagaattctcagtaacttccttgtgttgtgtgtattcaagtgacagagttgaactttcatttagagagagcagatttgaaacactgtttttgtggaatttgcaagtggagatttcaagcgctttggggccaaaggcagaaaaggaaatatcttcgtatataaactagacagaatgattctcagaaactcctttgtgatgtgtgcattcaactcacagagtttaaccattcttttcatagagcagttaggaaacactctgtttgtaaagactgcaagtggatattcagacctccttgaggccttcgttggaaacgggacttcttcatattatgctacacagaagaattctcagtaacttccttgtgttgtgtgtattcaactcacagagttgaacgatcctttacacagaacatacttgaaacactctttttgtggaatttgcaagtggagatttcagccgctttgaggtcaatggtagaataggaaatatcttcctatagaaactagacagaatgattctcagaaactcctttgtgaagtgtgcgttcaactcacagagtttaacctttctgttcatagagcagttaggaaacactctgtttgtaaagtctgcaagtggatattcagacctccttgaggccttcgttggaaacgggatttcttcatattctgctagacagaagaattctcagtaacttccttgtgttgtgtgtattcaactgagagagttgaactatcatttagagacagcagatttgaaacactgtttttgtggaatttgcaagtggagatttcaagcgctttggggccaaaggcagaaaaggaaatatcttcgtataaaaactagacagaatgattctcagaaactcctttgtgatgtgtgcgttcaactcacagagtttaacctttcttttcatagagcagttaggaaacactctgtttgtaaagtctgcacgtggatattttgaccacttagaggccttcgttggaaacgggttttcttcctgtaaggctagacagaagaattcccagtaacttccttgtgttgtgtacattcaactcacagagttgaacgttcccttagacagagcagatttgaaacactctttttgtgcaattggcaaatggagatttcaagcgctttaaggtcaatggcagaaaaggaaatatcttcgtttcaaaaatagacagaatcattcccacaaactgcgttgtgatgtgttcgttcaactcacagagtttaacctttctgttcatagagcagttaggaaacactctgtttgtaaagtctgtaactggatattctgacattttgtggccttcgttggaaacgggatttcttcatattctgctagacagaagaattctcagtaactgccttgtgttgtgtgtattcaactcacagagttgaacgatccttaacacagagcagacttgaaacactctttttgtggaacttgcaagtggagatttcagccgctttgaggtcaatggtagaataggaaatatcttcctatagaaactagacagaatgattctcataaactcctttgtgatgtgtgcgttcaactcacagagtttaacctttctgttcatagagcagttaggaaacactctgtttgtaaagtctgcaagtggatattcagaactccttgaggccttcgttggaaacgggatttcttcatattctgctagacagaagaattctcagtaacttccttgtgttgtgtgtattcaactcacagagttgaacgatcctttacacagagcagacttgaaacactctttttgtggaatttgcaaggggagatttcagccgctttgagttcaatggtagaataggaaatatcttcctatagaaactagacagaatgattctcagaaactcctttgtgatgtgtgccttcaactcacagagtttaacctttcttttcatagagcagttaggaaacactctgtttgtaaagtctgcaagtggatattcagacctctttgaggccttcgttggaaacgggatttcttcatactatgctagacagaagaattctcagtaacttccttgtgttgtgtgtattcaactcacagagttgaacgatcctttacacagagcagacttgaaacactctttttgtggaatttgcaaggggggatttctgccgctttgaggtcaatggtagaataggaaatatcttcctatagaaactagacagaacgattctcagaaactcctttgtgatgtgagcgttcaactcacagagtttaacctttcttttcatagagcagttaggaaacactctgtttgtaaagtctgcaagtggatattcagacctctttgaggccttctttggaaacgggatttcttcatattctgctagacagaagaattctcagtaacttccttgtgttgtgtgtattcaactgacagagttgaactttcatttagagagagcagatttgaaacactgtttttgtggaatttgcaagtggagatttcaagcgctttggggccaaaggcaaaaaaggaaatatcttcgtataaaaactagacagaatcattctcagaaactgctctgcgatgtgtgcgttcaactctcagagtttaacttttcttttcattcagcagtttggaaacactctgtttgtaaagtctgcacgtggatattttgaccacttagaggtcttcgttggaaacgggtttttttcctgtaaggcttgacagaagaattcccagtaacttccttgtgttgtgtgcattcaactcacagagttgaaagttcccttagacagagcagatttgaaacactctatttgtgcaatttgcaagtgtagatttcaagcgctttaaggtcaatggcagaaaaggaaatatcttcgtttcaaagctagacagaatcattcccacaaactgcgttgtgatgtgtgcgttcaactcaaagagtttaacctttcttttcatagagcagttaggaaacactctgtttgtaaagtcttcaagtggatattcagacctccttgaggccttcgttggaaacgggatttcttcatattctgctagacagaagaattctcagtaacttccttgtgttgtgtgtattcaactcacagagttgaacgatcctttacacagagcagacttgaaacactctttttctggaatttgcaagtggagatttcagccgctttgaggtcaattgtagaataggaaatatcttcctatagaaactagacagaatgattctcagaaacacttttgtgatgtgtgcgttcaactcacagagtttaacctttcttttcatagagcagttaggaaacactctgtttgtaaagtctgcaagtggatattcagacctctttgaggccttcgttggaaacgggatttcttcatattctgctagacagaaggattcccagtaacttccttgtgttgtgtgtgttcaactcacagagttgaactttcatttacaaagagcagatttgaaacactctttttgtggaatttgcaattggagatttcaagcgctttgaggccaaaggcagaaaaggaaatatcttcgtataaaaactagacagaatcattctcagaaactgctctgcgatgtgtgcgttcaactctcagagtttaacttttgttttcattcagcagtttggaaacactctgtttgtaaagtctgcacgtggataatttgaccacttagagttcttcgttggaaacgggtttttttcatgtaaggctagacagaagaattctcagtaacttccttgtgttgtgtgtattcaactcacagagttgaacgatcctttacacagagcagacttgtaacactctttttgtggaatttgcaagtggagatttcagccgctttgaagtcgaaggtacaaaaggaaatatcttcctataaaaactagacagaatgattctcagaaactcctttgtgatgtgtgcgttcaactcacagagtttaacctttcttttcatagagcagttaggaaacactctgtttgtaaagtctgcaagtggatattcagacatccttgaggctttcgttggaaacgggatttcttcatgttctgctagaaagaagaattctcaataacttccttgtgttgtgtgtattcaactgacagagttgaaccttccttcagatagagcagatttgaaacactctttttgtgtaatttgcaagtggagatttcaagcgctttgaggccaaaggcagaaaaggaaatatcttcgtataaaaactagacagaatcattcccacaaactgcgttgtgatgtgttcgttcaactcacagagtttaacctttcttttcatagagcagttaggaaacagtctgtttgtaaattctgtaagtggatattctgacatcttgcggccttcgttggaaacgggatttcttcatattctgctagacagaagaattcccagtaacttccttgtgttttgtacattcaacccacagagttgaacgtttccttagacagagcagatttgaaacactctttttgtgcaattggcaagtggtgatttcaaccactttcaggtcaaaggtagaaaaggaaatatcttcctataaaaactagacagaatcattcccacaaactgcgttgtgatgtgttccttcaactcacagagtttaacgtttccgttcatagagcagttaggaaacacactgtttgtaaagtctgtaagtggatattctgacatcttgtggccttcgttggaaacgggatttcttcatattctgctagacagaagaattctcagtaacttccttgtgttgtgtgtattcaactcacagagttgaatgatcctttacacagagcagacttgaaacgctctttttgtggaatttgcaagtggagatttcagccgcgttgaggtcaatggtagaaaaggaaatatcttcgtataaaaactagacagaatgattctcagaaacttctttgtgatgtgtgcgctcaactcacagagtttaacttttcttttcatagagcagttaggaaacactctgtttgtaaactctgcaagtggatattcagacctctttgaggccttcgttggaaacgggatttcttcatattatgcctgagagaagaattctcagtaacttccttgtgttgtgtgcattcaactcacagagttgaacgttcccttagacagagcagatttgaaacactctatttgtgcaatttgcaagtgtagatttcaagcgctttgaggccaacggcagaaaaggaaatatcttcgtagaaaaaatagacggaaatcattcccacaaactgcgttgtgatgtgttcgttcatctcacagagtttaagctttcttttcatagagcagttaggaaacactctgtttgtaaattctgtaagtggatattctgacatcttgtggccttcgttggaaacgggatttcttcatattctactagacagaagaattcccagtaacttccttgtgttgtgtacattcaactcacagagttgaacgttcccttagacagagcagatttgaaacactctttttgtgcaattggcaagtggagatttcaagcgctttgaggtcaatggcagaaaaggaaatatcttcgtttcaaaactagacagaatcattcccacaaactgcgttgtgatgtgttcgttcaactcacagagtttaacctttcttttcatagagcagttaggaaacagtctgtttgtgaattctgtaagtggatattctgacatcttgtggccttcgttggaaacgggatttcttcatattctgctagacagaagaattctcagaaacttccttgtgttgtgtgtattcaactcacagagttgaacgatcctttacagagagcagacttgaaacactctttttgtggaatttgcaagtggagatttcagccgctttgaggtcaatggtagaataggaaatatcttcctatagaaactagacagaatgattctcagaaactcctttgtgatgtgtgcgttcatctcacagagtttaacttttcttttcatggagcagttaggaaacactctgtttgtaaagtctgcaagtggatattcagacctctttgaggccttcgttggaaacgggatttcttcgtattctgctagacagaggattcccagtaacttccttgtgttgtgtgtgttcaactcacagagttgaactttcatttacaaagagcagatttgaaacactctttttgtggaatttgcaagtggagatttcaagcgctttgaggccaaaggcagaaaaggaaatatcttcgtataaaaactagacagaatcattctcagaaactgctgcgtgacgtgtgcgttcaactctcagagtttaacttttcttttcattcagcggtttggaaacactctgtttgtaaagtctgcacgtggatattttgaccacttagaggccttcgttggaaacgggtttttttcatgtaaggctagacagaagaattcccagtaacttccttgtgttgtgtgcattcaactcacagagttgaacgttcccttagacagagcagatttgaaacactctatttgtgcaatttgcaagtgtagatttcaagcgctttaaggtcaatggcagaaaagaaaatatcttcgtttcaaaactagacagaatcattcccacaaactgcgttgtgatgtgttcgttcaactcacagagtttaaccattcttttcatagagcagttaggaaacagtctgtttgtcaattctgtaagtggatattctgacatcttgtggccttcgttggaaacgggatttcttcatattctgctagacagaagaattctcagaatcttccttgtgttgtgtgtattcaactcacagagttgaacgatccttcacacagagcagacttgaaacactctttttgtggaatttgcaagtggagatttcagccgctttgaggtccatggtagaaaaggaaatatcttcgtataaaaactagacagaatgattctcagaaactcctttgtgatgtgtgcgttcaactcacagagtttaacctttctgttcatagagctgttaggaaacactctgtttgtaaagtctgcaagtgggtattcagacctccttgaggccttcgttggaaacgggatttcttcatattttgctagacagaagaattctcagtaacttccttgtgttgtgtgtattcaactgacagagttgaactttcatttagagagagcagttttgaaacactgtttttgtggaatttgcaagtggagatttcaagcgctttggggccaaaggcagaaaaggaaatatcttcgtataaaaactagacagaatcattctcagaaactgctctgcgatgtgtgcgttcaactctcagagtttaacttttcttttcattcagcagtttggaaacactctgtttgaaaagtctgcacgtggatattttgaccacttagaggccttcgttggaaacgcgtttttttcctgtaaggctagacagaagaattcccagtaacttccttgtgttgtgtacattcaactcacagagttgaacgttcccttagacagagcagatttgaaacactctttttgtgaaattggcaagtggtgatttcagccgctttgaggtcaatggtagaaaaggaaatatcttcgtataaaaactagacagaatcattcccacaaactgcgttgtgatgtgttcgttcaactcacagagtttaacctttctgttcatagagcagttaggaaacactctgtttgtaaagtctgcaagtggatattcagacctccttgaggccttcgttggaaacggggtttcttcatattctgctagacagaagaattctcagtaacttccttgtgttgtgtgtattcaactcacagagttgaacgatcctttacacagagcagacttgaaacattctttttgtcgaatttgcaagtggagatttcagccgctttgaggtcaatggtagaataggaaatatcttcctatagaaactagacagataatgattctcagaaactcctttgtgatgtgtgcgttcaactcacagagtttaacctttcttttcatagagcagttaggaaacactctgtttgtaaagtctgcaagtggatattcagacctctttgaggccttcgttggaaacgggtttttttcatataaggctagacagaagaattcccagtaacttccttgtgttgtgtgtgttcaactctgtgagttgaacttccatttacacagagcagatttgaaacactctttttgtggaatttgcaagtggagatttcaagcgctttgaggccaaaggcagaaaaggaaatatcttcgtttcaaaactagacagactcattctcaagaaactgctctgcgatgtgtgcgttcaactctcagagtttaacttttcttttcattcagcagtttggaaacactctgtttgtaaaatctgcacgtggatattttgaccacttagaggccttcgttggaaacgggtttctttcctgtaaggctagacagaagaattcccagtaacttacttgtgttgtgtacattcaactcacagagttgaacgttcccttagacagagcagatttgaaacactctttttgtgcaattggcaagtggtgatttcagctgctttgaggtctatggtagaaaagggaatatcttcggtataaaaactagacagaatcattcccacaaactgcgttgtgatgtgttcgttcaactcacagagtttaacctttctgttcatagaacagttaggaaacactctgtttgtaaagtctgcaagtggatattcagacctccttgaggccttcgttggaaacgggatttcttcatattctgctagaccgaagagttctcagaatcttccttgtgttgtgtgtattcaactcacagaattgaacgatcctttacacagagcagacttgaaacactctttttgtggaatttgcaagtggagatttcagccgctttgaggtccatggtagaaaaggaaatatcttcgtataaaaactagacagaatgattctcagaaactcctttgtgatgtgtgcgttcaactcacagagtttaacctttcttttcatagagcagttaggaaacactctgtttctaaagtctgcaagtggatattcagacctctttgaggccttcgttggaaacgggtttttttcatataaggctagagagaagaattcccagtaacttccttgtgttgtgtgtgttcaactcacagagttgaactttcatttacacagagcagatttgaaacactctttttgtggaatttgcaagtggaaatttcaagcgctgtgaggccaaaggcagaaaaggaaatatcttcgtataaaaactagacagaatcattctcagaaactgctctgcgatgtgtgcgttcaactctcagagtttaactttgcttttcatacagcagtttggaaacactctgtttgtaaagtctgcacgtggataatttgaccacttagaggccttcgttggaaacgggtttttttcatgtaaggctagacagaagaattctcagtaacttccttgtgttgtgtgtattcaactcacagagttgcacgatcctttacacagagcagacttgaaacactctttttgtggaatttgcaagtggagatttcagccgctttgaggtcaatggtagaataggaaatatcttcctatagacactagacagaatgattctcagaaactgctttgtgatgtgtgtgttcaactcacagagtttaacatttcttttcatagagcagttaggaaacactctgtttgtaaagtctgcaagtggatattcagacctctttgaggccttcgttggaaacgggtttttttcatataaggctagacagaagaattctcagtaacttccttgtgttgtgtgtattcaactgacagagttgaactttcatttagagagagcagatttgaaacactgtttttgtggaatttgcaagtggaaatttcaagtgctttggggccaaaggcagaaaaagaaatatcttcgtataaaaacttgacagaatcactctcagaaactgctctgcgatgtgtgcgttcaactctcagagtttaacttttgttttcattcagcagtttggaaacactctgtttgtaaagtctgcacgtggatattttgaccactcagaggccttcgttggaaacgggtttttttcctgtaaggctagacagaaagaattcccagtaacttccttgtgttgtgtgcattcaactcacagagttgaacgttcccttagacagagcagatttgaaacactctatttgtgcaatttgaaagtgtagatttcaagcgctttaaggtcaacggcagaaaaggaaatatcttcgtttcaaaactagacagatgattctcagaaactcctttgtgatgtgtgcgttcaactcacagagtttaacctttcttttcatagagcagttaggaaacattctgtttgtaaagtctgcaagtggatattcagacatctttgaggttttcgtaggaaacgggatttcttcatattctgctagacagaagaattctcagaaacttccttgtgttgtgtttattcaactcacagagtcgaacgatcctttactcagagcagacttgaaacactccatttgtggaatttgcaagtggagatttcagccgctttgaggtcaatggtagaataggaaatatcttcctatggaaactagacagaatgattctcagaaactcctttgtgctgtgtgcgttcagctcacagagtttaaactttcttttcatagagcagttaggaaacactctgtttgtaaagtctgcaagtggatattcagacatctttgaggctttcgttggaaacgggatttcttcatattctgctagacagaagaattctcagaaacttccttgtgttgtgtgttttcaactcacagagttcaacgatccattacacagagtagacttgaaacactctttttgtggaattggcaagtggagatttcagccgctttgaggtcaatggtagaaaaggaaatatcttcgtataaaaactagacagagtgattctcagaaactcctttgtgatgtctgcgttcaactcacagagtttaacctttcttttcatagagcagttaggaaacactctggttgtaaagtctgcaagtgcatattcagacctccttgaggccttcgttggaaacgggatttcttcatattctgctatacagaagaattctcagaaacttccttgtgttttgtgtattcaactcacagagttgaacgatcctttacacagagcagacttgaaacactctttttgtggaatttgcaagtggagatttcagccgctttgaggtcaatggtagaaaaggaaatatcttcgtataaaaactagacagaatgattctcagaaactcctttgtgatgtgtgcgttcaactcacagagtttaacctttcttttcatagagcagttaggaaacactctgttggtaaagtctgcaaggggatattcagacctctttgaggccttctttggaaacgggatttcttcatattctgctagacagaagaattctcagtaacttccttgtgttgtgtgtattcaactcacagagttgaatgatcctttacacagagcagacttgaaacactctttttgtggaatttgcaagtggagatttcagccgctttgaggtcaatggtagaataggaaataacttcctatagaaactagacagaatgattctcagaaactcctttgtgatgtgtgcgttcaactcgcagagtttaacctttcttttcatagagcagttaggaaacactctggttgtaaagtctgcaagtggatattcagacctccttgaggccttcgttggaaacgggatttcttcatattatgctagacagaaagcaattctcagtaacttccttgtgttgtgtgtattcaactcacagagttgaacgatcctttacacagagcagacttgaaacactctttttgtggaatttgcaagtggagatttcagccgctttgaggtcaatggtagaaaaggaaatatcttcgtataaagactagacagaatgattctcagaaactcctttgtgatgtgtgcgttcaactcacacagtttaacctttcttttcatagagcagttgggaaacactctgtttgtaaagtctgcaagtggatattcagacctccttgaggccttcgttggaaacgggatttcttcatattctgctagacagaagaattctcagtaacttccttgtgttgtgtgtattcaactcacagagttgaacgatcctttacacagagcagacttgaaacactctttttgtggaatttgcaagtggagatttcagccgctttgtggtcaatggtagaaaaggaattatcttcgtataaagactagacagaatgattctcagaaaatcctttgtgatgtgtgcgttcaactaacagagtttaacctttcttttcatagagcagttaggaaacactctgtttgtaaagtctgcaagtggatattcagacatctttgaggctttcgttggaaacgggatttcttcatattctgctatacagaagaattcccagtaacttcctcgtgttgtgtgtgttcaactcacagagttgaactttcatttacacagagcagatttgaaacactctttttgtggaatttgcaagtggagatttcaagcgctttgaggccaaaggcagaaaaggaaatatcttcgtataaaaactagacagaatcattctcagaaactgctctgcgatgtgtgcgttcaactctcagagtttaacttttcttttcattcagaagtttggaaacactctgtttgtaaagtctgcacgtggataacttgaccacttagaggccttcgttggaaacgggtttttttcctgtaaggctagacagaagaattctcagtaaattccttgtgttgtgtgtattcaactcacagagttgaacgatcctttacacagagcagacttgaaacactctttttgtggaatttgcaagtggagatttcagccgctttgaggtcaatggtagaataggaaatatcttcctatagaaactagacagaatgattctcagaaacttctttgtgatgtgtgcgttcaactcacagagtttaacatttcttttcatggagcagttaggaaacactctgtttgtaaactctgcaagtggatattcagacctctttgaggccttcgttggaaacgggatttcttcatactgtgctagacagaacaattcccagtaacttccttgtgttgtgtgtgttcaactcacagagttgaactttcatttacacagagcagatttgaaacactctttttgtggaatttgcaagtggagatttcaagcgctttgaggccaaaggcagaaaaggaaatatcttcgtataaaaactagacagaatcattctaagaaactgctctgcgatgtgtgtgttcaactctcagagtttaacttttcttttccttcagcagtttggaaacactctgtttgtaaagtctgcacgtacataatttgaccacttagaggccttcgttggaaacgggtttttttcatgtaaggctagacagaagaattcccagtaacttccttgtgttgtgtgcattcaactcacagagttgaacgttcccttagacagagcagatttgaaacactctatttgtgcaatttgcaagtgtagaattcaagcgctttaaggtgaatggcagaaaaggaaatgtcttcgtttcaaaactagacagaatcattcccaaaaactgcgttgtgatgtgttcgttcaactcacagagtttaacctttctgttcatagagcagttaggaaacactctgtttgtaaagtccgtaagtggatattctgacatcttgtggccttcgttggaaacgggatttcttcatattctgctagacagaagaattctcagtaacttccttgtgttgtgtgtattcaactcacagagttgaacgatcctttacacagagcagacttgaaacactctttttgtggaatttgcaagtggagatttcagccgcgttgaggtcaacggtagaaaaggaaatatcttcgtataaatactagacagaatgattctcagaaactcctttgtgatgtttgcgttcaactgacagagtttaaactttcttttcatagagcagttaggaaacactctgtttgtaaagtctgcaagtggatattcagacctctttgaggccttcgttggaaacgggatttcttcatattctgctagacagaagaattcccagtaacttccttgggttgtgtgtgttcaactcacagagttgaactttcatttacacagagcagatttgaaacactctttttgtggaatttgcaggtggagatttcaagcgctttgaggccaaaggcagaaaaggaaatatcttcgtataaaaactagacagaatcattctcagaaactgctctgcgatgtgtgcgttcaactctcagagtttaacttttgttttcattcagcagtttggaaacactctgtttgtaaagtctgcacgtggataatttgaccacttagaggccttcgttgtaaacgggtttttttcctgtaaggctagacagaggaattcccagtaacttccttgtgttgtgtgcattcaactcacagagatgaacgttcccttagacagagcagatttgaaacactctatttgtgtaatttgcaagtgtagatttcaagcgctttaaggtcaatggcagaaaaggatatatctccgtttcaaaactagacagaatcattcccacaaactgcgttgtgatgtgttcgttcaactcacagagtttaacctttctgttcatagagcagttaggaaacactctgtttgtaaagtctgtaagtggatattctgacatcttctggccttcgttggaaacgggatttcttcatattctgctagacagaagaattctcagaatcttccttgtgttgtgtgtattcaactcacagagttgaacgatcctttacacagagcagacttgaaacactctttttgtggaatttgcaagtggagatttcagccgctttgaggtccacggtagaaaaggaaatatcttcgtataaaaactagacggaatgattctcagaaactcctttgtgatgtgtgcgttcaactcacagagtttaacctttcttttcatagagcagttaggaaacactctgtttgtaaagtctgcaagtggatattcagacctctttgaggctttcgttggaaacgggatttcttcatattctgctagacagaagaattctcagtaacttccttgtgttgtgtgtattcaactgacagagttgaactttcatttagagagagcagatttgaaacactgtttttgtggaatttgcacgtggagatttcaagcgctttggggccaaaggcagaaaaggaaatatcttcgtataaaaactagacagaatcattctcagaaactgctctgcgatgtgtgcgttcaactctcagagtttaacttttcttttcattcagaagtttggaaacactctgtttgtaaagtctgcacgtggataacttgaccacttagaggccttcgttggaaacgggtttttttcatgtaaggctagagagaagaattcccagtaacttccttgtgttgtgtacattcaactcacagagttgaacgttcccttagacagagcagatttgaaacactctttttgtgcaattggcaagtggcgatttcagcctctttgaggtcaatggtagaaaaggaaatatcttcgtataaaaactagacagaatgattctcagaaacttcattctgatgtgtgtgttcaactcacagagtttaacctttcttttcatagagcagttgggaaacagtctgtttgtaaattctgtaagtggatattctgacatcttgtggccttcgttggaaacgggatttcttcatattctgctagacagaagaattctcaagtaacttccttgtgttgtgtgtattcaactcacagagttgaacgatcctttacacagagcggacttgaaacactcgttttgtggaatttgcaagtggaggtttctgccgcgttgaggtcaatggtagaaaaggaaatatcttcgtataaaaactagacagaatgattctcagaaactcctttgtgatgtgtgcgttcaactcacacagtttaacctttcttttcatagagcagttaggaaacactctgtttgtaaagtctgcaagtggatatacagacctccttgaggccttcgttggaaacgggatttcttcatattatgctagacagaagaattctcagtaacttccttgtgttgtgtgtattcaactcacagagttgaaggatcctttacagagagcaggcttgaaacactctttttgtcgaatttgcaagtggagatttcagccgctttgaggtcaatggtagaataggaaatatcttctaatagaaactagacagaatgattctcagaaacttcattgtgatgtgtgcgttcaactcacagagtttaacctttcttttcatagagcagttaggaaacactctgtttgtaaactctgcaagtggatattcagacctctttgaggccttcgttggaaacgggatttctccatactttgctagacagaagaattctcagtaacttccttgtgttgtgtttattcaactcacagagttgaatgatcctttacacagagcagacttgaaacactctttttgtggaatttgcaagtggagatttcagccgctttgaggtcaacggtagaaaagtaaatatcttcgtataaagactagacagaatgattctcagaaactcctttgtgatgtgtgcgttcaactcacagagtttaacctttcttttcatagagcagttaggaaacactctgtttgtaaagtctgcaagtggatattcagacctccttgaggccttcattggaaacgggatttcttcatattatgctagacagaagaattctcagtaacttccttgtgttgtgtgtattcaactcacagagttgaacgatcctttacacagagcatacttgaaacactcttgttgtggaatttgcaagtggagatttcagccgatttgagttcaatggtagaataggaaatatcttcctatagaaactagacagaatgattctcagaaactcctttgtgatgtgtgcgtacaactcacagagttcaacctttcttttcatagagcagttgggaaacactctgtttgtaaagtctgcaagtggatattcagacttctttgaggccttcgttggaagcgggatttcttcatattatgctagacagaagatttcccagtaacttccttgtgttgtgtacattcaactcacagagttgaacgttcccttagacagagcagatttgaaacactctttttgtgcaattggcaaatggagatttcaagcgctttaaggtcaatggcagaaaagaaaatatcttcgtttcaaaactagacagaatcattcccacaaactgcgttgtgatgtgttcgttcaactcacagagtttaacctttctgttcatagagcagttaggaaacactctgtttgtaaagtctgtaagtggatattctgacattttgtgtccttcgttggaaatgggatttcttcatattctgctagacagaagaattctcagtaacttccttgtgttgtgtgtattcaactcacagagttcaacgatgctttacacagagtagacttgaaacacactttttgttgaatttgcaagtggagatttcagccgctttgaggtcaatggtagaataggaaatatcttcgtataaaaagtagacagaatgattctcagaaactcctttgtgatgtgtgtgttcaactcacagagtttaacctttcttttcatagagcagttaggaaacactctgtttgtaaagtctgcaagtggatattcagacctcttgaggccttcgttggaaacgggtttttttcatataaggctagacagaagaattcccagtaacttccttgtgttgtgtgtgttcaactcacagagttgaactttcatttacacagagcagatttgaaacactctttttgtggaatttgcaaatggagatttcaagcgctttgaggccaaaggcagaaaaggaaatatcttcgtataaaacctagacagaatcattctcagaaactgctctgcgatgtgtgcgttcaactctcagagtttaacttttcttttcattcagcagtttggaaacactctgtttgtaaagtctgcacgtggataatttgacctcttagaggccttcgttggaaacgggtttttttcctgtaaggctagacagaagaattctcagtaacttccttgtgttgtgtgtattcaactcacagagttgaacgatcctttacacagagcagacttgtaagactctttttgtggaatttgcaagtggagatttcagccgctttgaagtcaaaggtagaaaaggaaatatcttcctataaaaactagacagaatgattctcagaaacttctttgtgatgtgtgcgttcaactcacagagtttaacctttcttttcatagagcagttaggaaacactctgtttgtaaactctgcaagtggatattcagacctccttgaggccttcgttggaaacgggatttcttcatactgtgctagacagaagaattctcagtaacttccttgtgttgtgtgtattcaactgacagagttgaactttcatttagagagagcagatttgaaacactgtttttgtggaatttgcaagtggagatttcaagcgctttggggccaaaggaagaaaaggaaatatcttcgtataaaaactagacagaatcattctcagaaaatcctctgtgatgtgtgcgttcaactctcagagtttaacttttcttttcattcagcagtttggaaacactctgtttgtaaagtctgcacgtggatattttgaccacttagaggccttcgttggaaacgggtttttttcatataaggctagacagaagaattcccagtaacttccttgtgttgtgtgcattcaactcacagagttgaacgttcccttagacagagccgatttgaaacactctatttgtgcaatttgcaagtgtagatttcaagcgctttaaggtcaatggcagaaaaggaaatatcttcgtttcaaaactagacagaatcattcccacaaactgcgttgtgatgtgttcgttcaactcacagagtttaacctttctgttcatagagcagttaggaaacactctgtttgtaaagtctgtaagtggatattctgacatcttgtggccttcgttggaaacgggatttcttcatattctgctggacagaggaattctcaggaacttccttgtgttgtgtgtattcaactcacagagttgaacgatcctttacacagagcagacttgaaacacactttttgtggaatttgcaagtggagatttcagccgctttgagttcaaaggtagaataggaaatatcttcctatagaaagtacacagaatgattctcagaaactgctttgtgatgtgtgcgttcaactcacagagttcaacctttcttttcatagagcagttgggaaacactctgtttgtaaagtctgcaagtggatattcagacttctttgaggccttcgttggaagcgggatttcttcatattctgctagacagaataattctcagtaacttccttgtgttgtgtgtattcaactcacagagttgaacgatcctttacagagagcagacttgaaacactctttttgtgtaatttgcaagtggagatttcagccgctttgaggtcaatggtagaataggaaatatcttcctatagaaactagacagaatgattctcagaaactcctttgtgatgtgtgcgtgcaactcacagagtttaacctttcttttcatagagaagttaggaaacactctgtttgtaaagtctgcaagtggatattcagacatccttgaggctttcgttggaaacgggatttcttcatattctgctagaaagaagaattctcattaacttccttgtgttgtgtgtattcaactcacagagttgaaggatcctttacacagagcggacttgaaacactctttttgtggaatttgcaagtggagatttcagccgcgttgaggtcaatggtagaaaaggaaatctcttcgtataaaaagtagacagaatgattctcagaaactcctttgtgatgtgtgtgttcaacccacagagtttaacctttcttttcatagagcagttaggaaacactctgtttgtaaagtctgcaagtggatattccgatctctttgaggccttcgttggaaacgggtttttttcatataaggctagacagaaggattcccagtaacttcccttgtgttgtgtgtgttcaactcacagagttgaactttcatatacaaagagcagatttgaaacactctttttgtggaatttgcaagtggagatttcaagcgctttgaggccaaaggcagaaaaggaaatatcttcgtataaaaactagacagaatcattctcagaaactgctgtgtgatgtgtgcgttcaactctcagagtttaacttttcttttcattcagcggtttggaaacactctgtttgtaaagtctgcacgtggatattttgaccacttagaggccttcgttggaaacggttttttttcatgtaaggctagacagaagaattcccagtaacttccttgtgttgtgtacattcaactcacagagttgaacgttcccttagacagagcagatttgaaacactctttttgtgcaattggcaagtggtgatttcagccgctttgaggtcaatggtagaaaaggaaatatcttcgtataataactagacagaatcattcccacaaactgcgttgtgatgtgttcgttcaactcacagagtttaacctttctgttcatagagcagttaggaaacactctgtttgtaaagtctggaagtggatattcagacctccttgaggccttcgttggaaacgggatttcttcatattctgctagacagaagaattctcagtaacttccttgtgttgtgtgtattcaactcacagagttgaacgatcctttacacagagcagacttgaaacactctttttgtggaatttgcaagtggatatttcagccgctttgaggtcaatggtagaataggaaatatcttcctatagaaactagacagaatgattctcagaaactcctttgtgatgtgtgcgttcaactcacacagtttaacctttcttttcatagagcagttaggaaacactctgtttgtaaagtctgcaagtggatattcagacctctttgaggcattcgttggaaacgggatttctacatattatgctagacagaagaattcccagtaacttccttgtgttgtgtgtgttcgactcacagagttgaactttcatttacacagagcagatttgaaacactctttttgtggaatttgcaagtggagatttcaagcactttgaggccaaaggcagaaaaggaaatatcttcgtttcaaaactagacagaattattctcagaaactcctttgtgatgtgtgcgttcaactcacagagtttaacctttcttttcatagagcagttaggaaacactctgtttgtaaagactgcaagtggatattcagacctctttgaggccttcgttggaaacgggtttttttcctgtaaggctagacagaagaattcccagtaacttccttgtgttgtgtacattcaactcacagagttgaacgttcccttagacagagcagatttgaaacactctttttgtgcaattggcaagtggagatttcaagcgctttacggtcaatggcagaaaaggaaatatcttcgtttcaaaacaagacagaatcattcccacaaactgcgttgtgatgtgttcgttcaactcacagagtttaacctttctgttcatagagcagttaggaaacactctgtttgtaaagtctgcaagtggatattcagacctctttgaggccttcgttggaaacgggatttcttcatattctgctagacagaagaattctcagtaacttccttgtgttgtgtgtattcaactcacagagttgaacaatcctttacacagagcagagttgaaacactctttttgtggaatttgcaagtggagatttcagctgctttgaggtcaatggtagaataggaaatatcttcctatagaaactagacagaatgattctcagaaactcctttgtgatgtgtgcgttcaaatcacagagtttaacctttctgttcatagagcagttaggaaacactctgtttgtaaagtctgccagtggatattcagacctccttgattccttcgttggaaatgggatttcttcatattctgctagacagaagaattctcagtaacttctttgtgttgtgtgtattcaactcacagagttgaacgatcctttacacagagcagacatgaaacactctttttgtggaatttgcaagtggagatttctgccgctttgaggtcaatggtagaataggaaatatcttcctatagaaaatagacagaatgattctcagaaacttctttgtgatgtgtacgttcaactcacaggagtttaacctttcttttcttagagcagttaggaaacactctgtttgtaaagtctgcaagtggatattcagacctctttgaggccttcgttggaaacgggtttttttcatataaggctagacagaagaattctcagtaacttccttgtgttgtgtgtattcaactcacagatttcaacgatcctttacacagagcagacttgaaacactctttttctggaatttgcaagtggagatttcagccgctttgaggtcaatggtagaataggaaatatcttcctatagaaactagacagaatgattctcagaaactcctttgtgatgtgtgcgttcaactcacagagtttaacgtttcttttcacagagcagttaggaaacactctgtttgtaatgtctgcaagtggatattcagaaccctttgaggccttcgttggaaacgggatttcttcatattatgctagacagaataattctcagtaacttccttcttttgtgtgtattcaactcacagagttgaacgatcctttacagagagcagacttgaaacactctttttgtggaatttgcaagtggagatttcaggcgctttgaggtcaatggtagaataggaaatatcttcctatagaaactagacagaatgattctcagaaactcctttgtgatgtgtgcgttcaactcacagagtttaagctttcttttcatagagcagttaggaaacactctgtttgtaaagtctgcaagtggctattcagacccctttgaggccttctttcgaaacgggatttcttcatattatgctagacagaagaattctcagtaacttccttgtgttgtgtgttttcaactgacagagttaaactttcatttagagagagcagatttgaaacactgtttttgtggaatttgcaagtggagatttcaagcgctttgtggccaaaggtagaaaaggaaatatcttcgtataaaaactagacagaatcattctcagaaactgctctgcgatgtgtgcgttcaactctcagagtttaacttttcttttcatagagcagttaggaaacactctggtttgtaaagtctgcatgtggataatttgaccacttagaggtctttgttggaaacgggttttttcatgtaaggctagacagaagaattcccagtaacttccttgtgttgtgtgcattcaactcacagagttgaacgttcccttagacagagcagatttgaaacactctatttgtgcaatttgcaagtgtagatttcaagcgctttaaggtcaatggcagaaaaggaaatttcttcgttttaaaactagacagaatgattctcagaaactcctttgtgatgtgtgcgttcaactcacagagtttaacgtttcttttcatagagcagttaggaaacactctgtttgtaaagtctgcaaggggatattcagacctctctgaggccttcgttggaaacgggatttcttcatattctgcttcacagaagaattctcagtaacttcccttgtgttgtgtgtattcaactcacagagttgaacgatcctttacacagagcagacttgaaacactctttttgtggaatttgcaagtggagatttcagccgctttgaggtcaatggttgaataggaaatatcttccaatagaaactagacagaatgattctcagaaactcctttgtgatgtgtgcgttcaactcacagagtttaacctttcttttcatagagtagttaggaaacactctgtttgtaaagtctgcaagtggatattcagacctctttgagaccttcgttggaaacgggtttttttcatataaggctagacagaagaattctcagtaacttccttgtgttgtgtgtattcaactcacagagttgaacgatcctttacacagagcagacttgaaacattctttttgtggaatttgcaagtggagatttcagccgctttgaggtcaatggtagaaaagtaaatatcttcctataaagactagacagaatgattctcagaaacttctttgtgatgtttgcgttcaactcacagagtttaacctttcttttcatagagcagttaggaaacactctgtttgtaaagtctgcaagtggatattcagacctccttgaggccttcgttggaagcgggatttcttcatgttctggtagacagaagaattctcagtaacatctttgtgttgtgtgtattcaactcacagagtggaacgatcctttacagagagcagacttgaaacactctttttgtggaatttgcaagtggagatttcagccgctttgaggtcaatggtagaataggaaatatcttcctatagaaactagacagaatgattctcagaaactcctttgtgatgcgtgcgttcaactcacagagtttaacctttcttttcatagagcagttaggaaacactctgtttgtaaagtctgcaagtggatattcagacctctttgaggccttcgttggaaacgggatttcttcatattatgctagacagaagaattctcagtaacttccttgtgttgtgtgtattcaactgacagagttgaactttcatttagagagagcagatttgaaacactgtttttgtggcatttgcaagtggagatttcaagcgctttggggccaaaggcagaaaacgaaatatcttcgtataaaaactagacagaatcattctcagaaactgctctgcgatgtgtgcgttcaactctcagagtttaacttttcttttcattcagcagtttggaatcactctgtttgtaaagtctgcacgtggatattttgaccacttagaggccttcgttggaaacgggtttttttcctgtaaggctagacagaagaattctcagtaacttccttgtgttgtgtgtattcaactcacagagttgaacgatcctttacacagagcagacttgtaacactcattttgtggaatttgcaagtggagatttcagccactttgaagtcaaaggtagaaaaggaaataacttcctataaaaactagacagaatcattcccacaaactgcgttgtgatgtgttcgttcaactcacagagtttaacctttctgttcatagagcagttaggaaacactctgtttgtaaagtctgtaagtggatattctgacatcttgtggccttctttggaaacgggatttcttcatattctgctagacagaataattctcagtaacttctttgtgttgtgtgtattcaactcacagagttgaaggatcctttacagagagcaggcttgaaacactctttttgtcgaatttgcaagtggagatttcagccgctttgaggtcaatggttgaataggaaatagcttcttatagaaactagacagaatgattctcagaaactcctttgtgatgtgtgcgttcaactcacagagtttaacctttcttttcatagcgcagttgggaaacactctgtttgtaaagtctgcaagtggatattcagacatccttgaggctttcgttggaaacgggatttcttcatattctgctagaaagaagaattctcagtaacttccttgtgttgtgtgtattcaactcacagagttgaacgatcctttacacagagcagacttgaaacactctttttgtggaatttacaagtggagatttcagccgatttgaggtcaatggtagaaaaggaaatatcttcctatagaaactagacagaatgattctcagaaactcctttgtgatgtgtgcgttcaactcacagagttcaacctttcttttcatagagcagttgggaaacactctgtttgtaaagtctgcaagtggatattcagacctccttgaggccttcgttggcaacgggatttcttcatattctgctagacagaagaattctcagtaacttccttgtgttgtgtgtattcaactcacagagttgaacgatcctttacacagagccgacttgaaacactctttttgtggaatttgcaagtggagatttcagccgctttgagttcaatggtagaataggaaatatcttcctatagaaactagacagaaagattctcagaaactccttcgtgatgtgtgcgttcaactcacagagtttaacctttcttttcagagagcagttaggaaacactctgtttgtaaagtctgcaagtggatattcagacctctttgaggccttcgttggaaacgggatttcttcatattctgctagacagaagaattcccagtaacttccttgtgttgtgtgtgttcaactcacagagttgaactttcatttacacagagcagatttgaaacactctttttgtggaatttgcaagtggagatttcaagcgatttgaggccaaaggcagaaaaggaaatatcttcgtataaaaagtagacagaatcattctcagaaactgctctgagatgtgtgcattcaactctcagagtttaacttttcttttcattcagcagtttggaaacactctgtttgtaaagtctgcacgtggataatttgaccacttagaggccttcgttggaaacgggtttttttcatgtaaggctagacagaagaattcccagtaacttccttgtgttgtgcgcattcaactcacagagttgaacgttcccttagacagagcagatttgaaacactctatttgtgcaatttccaagtgtagatttcaagcgctttaaggtcaacggcagaaaaggaaatatccttcgtttcaaaactagacagaatcattcccacaaactgcgttgtgatgtgttcgttcaactcacagtagtttaacctttcttttcatagagcagttaggaaacagtctgtttgtcaattctgtaagtggatattctgacatcttgtggccttcgttggaaacgggatttcttcatattctcctagacagaagaattctcagtaacttccttgtgttgtgtgtattcaactcacagagttgaaagatcctttacacagagcagacttgaaacactctttttgtggaatttgcaagtggagatttcagccgctttgatgtcactggtagaaaaggaaatatcttcgtataaagactagacagaatgattctcagaaactcctttgtgatgtgtgcgttcaactcacagagtttaacctttcttttcatagagcagttaggaaacactctgtttgtaaagtctgcaagtggatattcagacctctttgaggaaatcgttggaaacgggatttcttcacattctgctagacagaagaattcccagtaacttccttgtgttgtgtgtgttcaactcacagagttgaactttcatttacacagagcagatttgaaacactctttttgtggaatttgtaagtggagatttcaagcgctttgaggccaaaggcagaaaaggaaatatcttcgtttcaaaactagacagaatcattctcagaaactgctgcgtgatgtgtgctttcaactctcagagtttaacttttcttttcattcagcggtttggaaacactctgtttgtaaagtctgcacgtggatattttgaccacttagaggccttcgttggaaacgggtttttttcatgtaagggtagacagaataattctcagtaacttccttgtgttgtgtgtattctactcacagagttgaacgatcctttacacagagcagacttgaaacactctttttgtggaatttgcaagtggatatttcagccgctttgaggtcaatggtagaataggaaatatcttcctatagaaactagaccgaatgattctcagaaactcctttgtgatgtgtgcgttcaactcacaagagtttaacctttcttttcttagagcagttaggaaacactctgtttgtaaagtctgcaagtggatattcagacctccttgaggccttcgttggaaacgggtttttttcatataaggctagacagaagaattcccagtaacttccttgtgctgtgtgtgttcaactcacagagttgaactttcatttacacagagcagatttgaaacactctttttgtggaatttgcaagtggagatttcaagcgctttgaggccaaaggcagaaaaggaaatatcttcgtttcaaaactagacagaatcattctcagaaaatcctctgtgatgtgtgcgttcaactctcagagtttaacttttcttttcattcagcagtttggaaacactctgtttgtaaagtctgcacgtggatattttgaccacttacaggccttcgttggaaacgggttttttcatgtaagggtagacagaagaattcccaggaacttccttgtgttgtgtacattcaactcacagagttgaacgttcccttagacagagcagatttgaaacactctttttgtgcaattggcaagtggtgatttcagccgctttgaggtcaatggtagaaaaggaaatatcttcgtagaaaaactagacagaatgattctcagaaactcctttgtgatgtgtgcgttcaactcacagagtttaacctttcttttcatagagcagttaggaaacactctgtttgtaaagtctgcaagtggatattcagacctccttgaggccttcgttggaaacgggatttcttcatattctgctagatagaagaattctcagtaacttccttgtgttgtgtgtattcaacttacagagttgaacgattctttacacagagcagacttgaaacactctttttgtggaatttgcaagtggagatttcagccgctttgaggtcaatggtagaaaaggaaatatcttcgtataaagactagacagaatgattctcagaaactcctttgtgctgtgtgcgttcaactcacagagtttaacctttcttttcatagaacagatagtaaacactctgtttgtaaagtctgcaagtggatattcagacatctttgaggctttcgttggaaacgggatttcttcatattctgctagacagaataattctcagtaacttccttgtgttgtgtgtattcaactcacagagttgaacgatcctttacacagagcagacttgaaacactctttttgtggaatttgcaagtggagatttcagccgcgttgaggtcaatggtagaataggaaatatcttcctatagaaactagacagaatcattctcagaaactgctgcgtgatgtgtgcgttcaactctcagagtttaacttttcttttcattcagcggtttggaaacactctgtttgtaaagtctgcacagtggatattttgaccacttagaggccttcgttggaaacgggtttttttcaagtaaggctagacagaagaattcccagtaacttccttgtgttgtgtacattcaactcacagagttgaacgttcccttagacagagcagatttgaaacactctttttgcgcaattggcaagtggagatttcaagcgctttaagatcaatggcagaaaaggaaatatcttcgtttcaaaactagacagaatgattctcagaaactcctttgtgatgtgttcgttcaactcacagagtttaacctttcttttcatagagcagttaggaaacactctgtttgtaaagtctgcaagtggatattcagacatccttgaggctttcgttggaaacgggatttcttcatattctgctagaaagaagaattctcagtaacttccttgtgttgtgtgtattcagctcacagagttgaacgatcctttacacagagcagacttgaaacactctttttgtggaatttgcaagtggagatttcagccgctttgaggtcaatggtagaataggaaatatcttcctatagaaactagacagaatgattctcagaaaaacctttgtgatgtgtgtgttcaactcacagagtttaacctttcttttcatagagcagttaggaaacactctgtttttaaagtctgcaagtggatattgagacctctttcaggccttcgttggaaacgggatttcttcatattatgctagacagaagaattctcagtaacttccttgcgttgtgtgtattcaactgacagagttgaactttcatttagagagagcagatttgaaacactgtttttgtcgaatttccaatggagatttcaagcgctttggggccaaaggcagaaaaggaaatatcttcgtataaaaactagacagaatcattctcagaaactgctgcgtgatgtgtgcgttcaactcctcagagtttaacttttcttttcattcagcggtttggaaacactctgtttgtaaagtctgcacgtggaaattttgaccacttagaggccttcgttggaaacgggtttttttcatgtaaggctagacagaagaattcccagtaacttccttgtgttgtgtgcattcaactcacagagttgaacgttcccttagacagagcagatttgaaacactctatttgtgcaatttgcaagtgtagttttcaagctctttaaggtcaacggcagaaaaggaaatatcttcgtttcaaaactagacagaatcattcccacaaactgcgatgtgatgtgttcgttaaactcacagagtttaacctttctgttcatagagcagttaggaaacactctgtttggaaagtctgtaagtggatattctgacatcttgtggccttcgttggaaacgggatttcttcatattctgctagacagaagaattctcagaatcttccttgtgttgtgtgtattcaactcaaagagttgaacgatcctttacacagagcagacttgaaacactctttttgtggaatttgcaagtggagatttcacccgctttgaggtccatggtagaaaaggaaatatctttgtataaaaactagacagaatgattctgagaaactcctttgtgatgtgtgcgttcaactcacagagtttaacctttcttttcatagagcagttaggaaacactctgtttgtaaagtctgcaagtggatattcagacctctttgaggccttcgttggaaacgggatttcatcatattctgctagacagaagaattctcattaacttccttgtgttgtgtgtattcaactcacagagttgaacgatcctttacacagagcggacttgaaacactctttttgtgtaatttgcaagtggagatttcagccgcgttgaggtcaatggtagaaaaggagatctcttcgtataaaaactagacagaatgattctcagaaactcctttgagatgtgtgcgctcaactcacagagtttaacctttctttttatagagcagttaggaaacactctgtttgtaaagtctgcaagtggatattcagacctctttgaggccttcgttggaaacgggtttttttcatataaggctagacagaagaattcccagtaacttccttgtgttgtgtgcattcaactcacagagatgaacgttcgcttagacagagcagatttgaaacactctatttgtgcaatttgcaagtgtagatttcaagcgctttaaggtcaatggcagaaaaggaaatatcttcgtttcaaaactagacagaatcattcccacaaactgcgttgtgatgtattcgttcaactcacagagtttaacctttctgttcatagagcagttaggaaacactctgtttgtaaagtctgtaagtggatattctgacatcttgtggcccttcgttggaaacgggatttcttcatattctgctagacagaagaattcccagtaacttccttgtgttgtgtgtattcaactcacagagttgaacgatcctttacacagagcagacttgaaacactctttttgtggaatttgcaagtggagatttcagccgctttgaggtcaatggtagaaaaggaaatatcttcgtagaaaaactagacagaatgattctcagaaactcctttgtgatgtgtgtgttcaactcacagagtttaacctttcttttcatagggcagttaggaaacactctgtttgtaaagtctgcaagtggatattcagacctcctagaggccttcgttggaaacgggatttcttcatattctgctacacagaagaattcccagtaacttccttgtgttgtgtgtgttcaactcacagagttgaactttcatttacccagagcagatttgaaacactcttttagtggaatttgcaagtggagatttcaagcgctttgaggccaaaggcagaaaaggaaatatcttcgtttcaaaattagacagaatcattctcagaaactgctgcgtgatgtgtgcgttcaactctcagagtttaacttttcttttcattcagcggtttggaaacactctgtttgtaaagtctgcacgtggttattttgaccacttagacgccttcgttggaaacgggtttttttcatgtaaggctagacagaagaattcccagtaacttccttgtgttgtgtgcattcaactcacagagttgaacgttccgtagacagagcagatttgaaacactctatttgtgcaatttgcaagtgtagatttcaagcgctttaaggtcaatggcagaaaaggaaatatcttcgtttcaaaactagacagaatgattctcagaaaatcttttgtgatgcgtgcgttcaactcacagagtttaacttttcttctcatagagcagttaggaaacactctgtttgtaaagtctgcaagtggatattcagacctctttgaggccttcgttggaaacgggatttcttcatattatgctagacagaataattctcagtaacttccttgtgttgtgtgtattcaactcacagagttgaaggatcctttacagagagcaggcttgaaacactctttttgtcgaatttgcaagtggagaattcagccgctttgaggtcaatggtagaataggaaatatcttcttatagaaactagacagaatgattctcagaaactcctttgtgatgtgtgcgttcaacacacagagttcaaactttcttttcatagagcagttgggaaaaactctgtttgtaaagtctgcaagtggatattcagacttctttgaggccttcgttggaagcgggatttcttcatattctgctagacagaagaattctcagtaacctccttgtgttgcgtgcattcaactgacagggttgaaatttcatttagacagagcagatttgaaacactgtttttgtggaatttgcaagtggagatgtcaagcgctttggggccaaaggcagaaaaggaaatatcttcgtataaaaactagacagaatcattctcagaaactgctctgcgatgtgtgcgttcaactctcagagtttaacttttctttccattcagcagtttggaaacactctgtttgtaaagtctgcacgtggataatttgactacttagaggccttcgttggaaacgggtttttttcctgtaaggctagagagaagaattcccagtaactttcttgtgttgtgtacattcaactcacagaattgaacgttcccttagacagagcagatttgaaacactctgtttgtgcaattggcaagtggtgatttcatccgctttgaggtcaatggtagaaaaggaaatatcttcgtataaaaactagacagaatctttcccacaaactgccttgtgatgtgttcgttcaactcacagagtttaacctttctgttcatagagcagttaggaaacactctgtttgtaaagtctgcaagtggatattcagacctccttgaggccttcgttggaaacgggatttcttcatattctgctagacagaataattctcagtaacttccttgtgttgtgtgttttcaactcacagagttgaacgatcctttacacagagcagacttgaaacactctttttgtggaatttgcaagtggagatttcagccgctttgaggtcaatggtagaataggaaatatcttcctatagaaactagacagaatgattctcagaaactcctttgtgatgtgtgcgttcaactcacagagtttaacctttcttttcatagagcagttaggaaacactctgtttttatagtctgcaagtggatattcagacatctttgaggccttcgttggaaacgtgatttcttcatattctgctatacagaagaattctcagaaacttccttgtgttgtgtgttttcaactcacagagttgaacgatgctttacacagagtagacttgaaacactctttttgtgtaatttgcaagtagagatttcagccgctttgaggtcaatggtagaaaaggaaatatcttcgtataaaaactagacagaatcattctcagaaactgctgcgtgatgtgtgcgttcaactctcagagtttaacttttcttttcattcagcggtttggaaacactctgtttgtaaagtctgcacgtggatattttgaccacttagaggccttcgttggaaacgggttttttttcatgtaaggctagacagaagaattcccagtaacttccttgtgttgtgtgcattcaactcacagagttgaacgttcccttagacagagcagatttgaaacactctatttgtgcaatttgaaagtgtagatttcaagcgctttaaggtcaacggcagaaaaggaaatatcttcgtttcaaaactagacagaatcattcccacaaactgcgttgtgatgtgttcgttcaactcacagagttttacctttctgttcatagagcagttaggaaacactctgtttgtaaagtctgcaagtggatattcagacctcctagaggccttcgttggaaacgggatttcttcatattctgctagacagaagaattctcagtaacttccttgtgttgtgtgtattcaactcacagagttgaacgatcctttacacagagcagacttgaaacactctttttgtggaatttgcaagtggagatttcagccgctttgaggtcaatggtagaataggaaatatcttcttatagaaactagacagaatgattctcagaaactcctttgtgatgtgtgcgttcaactcacagagtttaacctttcttttcatagagcagttaggaaacactccgtttgtaaagtctgcaagtggatattcagacctctttgaggccttcgttggaaacgggtttttttcatataaggctagacagaagaattctcagtaacttccttgtgttgtgtgtattcaactcacagagttgaacgatcttttacacagaccagacttgaaacactctttttgtggaatttgcaagtggagatttcagccgctttgaggtcaatggtagaataggaaatatcttcctatagaaactagacagaatcattctcagaaactcctttgtgatgtgtgcgttcaactcacagagtttaacctttcttttcatagagcacttaggaaacactctgtttgtaaagtctgcaagtggatattcagacctccttgaggccttcgttggaaacgggatttcttcatattatgctagacagaagaattctcagtaacttccttgtgttgtgtgtattcaactgacagagttgaactttcatttagagagagcagatttgaaacactgtttttgtggaatttgtaagtggaaatttcaagcgctttggggccaaaggcagaaaaggaaatatcttcgtataaaaactagacagaatcattctcagaaactgctctgcgatgtgtgcgttcaactctcagagttaaacttttcttttcattcagcagtttggaaacactctgtttgtaaagtctgcacgtggataatttgaccacttagaggccttcgttggaaacggttttttttaatgtaaggctagacagaagaattcccagtaacttccttgtgttgtgtgcattcaactcacagagttgaacgttcccttagacagagcagatttgaaacactctatttgtgcaatttgcaagtgtagatttcaagcgctttaaggtcaatggcagaaaaggaaatatcttcgtttcaatactagacagaatgattctcagaaactcctttgtgatgtgtgcgttcaagtcgcagagtttaacctttcttttcatagagcagttaggaaacactctgtttgtaaagtgtgcaagtggatattcagacctctttgaggccttcgttggaaacgggatttcttcatattctgctagacagaagaattctcagtaacttccttgtgttgtgtgtattcaactcacagagttcaacgatcctttacacagagcagacttgaaaaaatctttttgtggaatttgcaagtggagatttcagccgctttgaggtcaatggtagaaaaggaaatatcttcgtataaaaactagacagaatgattctcagaaactcctttgtgatgtgtgcgttcaactcacagagtttcacctttcttttcatagagcagttaggaaacactctgtttgtaaagtctgcaagtggatattcagacctccttgagggcttcgttggaaacgggatttcttcatattctgctagacagaagaattcccagtaacttccttgtgttgtgtgtgttcaactcacagagttgaactttcatttacacagagcagatttgaaacactctttttgtggaatttgcaagtggagatttcaagcgctgtgaggccaaaggcagaaaaggaaatatcttcgtatagaaactagacagaatcattctcagaaactgctgcgtgatgtgtgcgttcaactcacagagtttaacttttcttttcattcagcggtttggaaacactctgtttgtaatgtctgcacgtggatattttgaccacttagaggccttcgttggaaacgggattttttcatgtaaggctagacagaagaattcccagtaacttccttgtgttgtgtacattcaactcacagagttgaacgttcccttagacagagcagatttgaaacactctttttgtgcaattggcaagtggagatttcaagcgctttaaggtcaatggcagaaaaggaaatatcttcgtttcaaaactagagagaatcattcccacaaactgcgttgtgatgtgttcgttcaactcacagagtttaacctttctgttcataaagcagttaggaaacactctgtttgtaaagtctgtaagtggatattctgacatcttgtggccttcgttggaaacgggatttcttcatattctgctagacagaagaattctcagtaacttccttgtgttgtgtgtattcaactcacagatttgaacgatcctttacacagagcagtcttgaaacactctttttgtggaatttgcaagtggagatttcagccgctttgaggtcaatagtagaaaaggaaatatcttcgtagaaaaactagacagaatgattctcagaaaatcttttgtgatgtgtgcgttcaactcacagagtttaacttttcttctcatagagcagttaggaaacactctgtttgtaaagtctgcaagtggatattcagacctctttgaggccttcggtggaaacgggatttcttcatattatgctagacagaagaattctcagtaacttccttgtgttgtgtgtgttcaactcacagagttgaactttcatttacacagagcagactttaaacactctttttgtggaatttgcaagtggagatttcaagcgctttgaggccaaaggcagaaaaggaaatatcttcgtataaaaactagacagaatcattctcataaactgctgcgtgatgtgtgccttcaactctcagagtttaacttttcttttcattcagcggtttggaaacactctgtttgtaaagtctgcacgtggatatttttgaccacttagaggccttcgttggaaacgggtttttttcatgtaaggctagacggaagaattcccagtaacttccttgtgttgtgtgcatttaactcacagagttgaacgttcccttagacagagcagatttgaaacactctatttgtgcaatttgcaagtgtagatttcaagcgctttaaggtcaatggcagaaaaggaaatatcttcgtttcaaaactagacagataatcattcccacaaactgcgttgtgatgtgttcgttcaactcacagagtttaacctttcttttcatagagcagttaggaaacagtctgtttgtaaattctgtaagtggatattctgacatcttgtggccttcgttggaaacgggatttcttcatattctgctagacagaagaattctcagtaacttcgttgtgttgtgtgtattcaactcacagagttgaacgatcctttacacagagcagacttgaaacactctttttgtggaatttgcaagtggagatttcagccgctttgaggtcaatggtagaataggaaatatcttcctatagaaactagacagaatgattctcagaaactgctttgtgatgtatgcgttcaactcacagagttcaaccattctgttcatagagcagttaggaaacactctgtttgtaaagtctgcaagtggatattcagacctctttgaggccttcgttggaaacgggatttcttcatattctgctagacagaagaattctcagtaacttccttgtgttgtgtgtattcaactgacagagttgaactttcatttagagagagcagatttgaaacactgtttttgtggaatttgcaattggagatttcaagcgctttggggccaagggcagaaaaggaaatatcttcgtataaaaactagacagaatcattctcagaaactgctgcgtgatgtgtgcgttcaattctgagagtttaacttttcttttcattcagcggtttggaaacactctgtttgtaaagtctgcacgtggaaattttgaccacttagaggccttcgttggaaacgggtttttttcatgtaaggctagacagaagaattcccagtaacttccttgtgttgtgtgcattcaactcacagagttgaacgttccctaagacagagcagatttgaaacactctatttgtgcaatttgcaagtgtagatttcaagcgctttaaggtcaacggcagaaaaggaaatatcttcgtttcaaaactagacagaatcattcccacaaactgcgttgtgatgtgtgtgttcaactcacagagtttcacctttcttttcatagagcagttaggaaacagtctgtttgtcaattctgtaagtggatattctgacatcttgtggccttcgttggaaacgggatttcttcatattctgctagacagaagaattctcagtaacttccttgtgttgtgtgtattcaactcacagagttgaacgatcctttacacagagtagacttgaaacactctttttgtggaatttgcaagtggagatttcagccgctttgaggtcaatggtagaaaaggaaatatcttcgtataaaaactagacagaatgattctcagaaacttctttgtgatgtgtgcgttcaactcatagagtttaacctttcttttcatagagcagttaggaaacactcggtttgtaaactctgcaagtggatattcagacctctttgaggccttcgttggaaacgggatttcttcatactgtgctagacagaagaattctcagtaacttcccttgtgttgtgtgtattcaactcacagagttgaacgatcctttacacagagcggacttgaaacactctttttgtgaaatttgcaagtggagatttcagccgcgttgaggtcaatggtagaaaaggaaatatcttcgtataaaaactagacagaatcattctcagaaactgctgcgtgatgtgtgcgttcaactctcagagtttaacttttcttttcattcagcggtttggaaacactctgtttgtaaagtctgcacgtggatattttgaccacttagaggccttcgttggaaacgggtttttttcatgtacggctagacagaagaattcccagtaacttccttgttttgtgtacattcaactcacagagttgaacgttcccttagatagagcagatttgaaacactctttttgtgcaattggcaagtggtgatttcagccgctttgaggtcaatggtagaaaaggaaatatcttcgtataaaaactagacagaatcattcccacaaactgcgttgtgatgtgttcgttcaactcacagagtttaacctttctgttcatagagcagttaggaaacactctgtttgtaaagtctgtaagtggatattctgacatcttgtggccttcgttggaaacgggatttcttcatattctgctacacagaagaattctcagtaacttccttgtgttgtgtgtattcaacgcacagagttgaacgatcctttacacagagcagacttgaaacactctttttgtggaatttgcaagtggagatttcagccgctttgaggtcaatggtagaaaaggaaactatcttcatataaagactagacagaatgattctcagaaactcctttgtgctgtgtgcgttcaactcacagagtttaacctttcttttcatagagcagttaggaaacactctgtttgtaaagtctgcaagtggatattcagacatctttgaggctttcgttggaaacgggatttcttcatattctgctagacagaagaattcccagtaacatccttgtgttgtgtgtgttcaactcacagagttgaactttcatttacacagagcagatttgaaacactctttttgtggaatttgcaagtggagatttcaagcgctttgaggccaaaggcagaaaaggaaatatcttcgtttcaaaactagacagaatcattctcagaatctgctgcgtgatgtgtgcgttcaactctcagagtttaacttttcttttcattcagcggtttggaaacactctgtttgtaaagtctgcacgtggaaattttgaccacttagaggccttcgttggaaacgggtttttttcatgtaaggctagacagaagaattcccagtaacttccttgtgttgtgtgcattcaactcacagagttgaacgttcccttagacagagcagatttgaaacactctatttgtgcaatttgcaagtgtagttttcaagctctttaaggtcaacggcagaaaaggaaatatcttcgtttcaaaactagagagaacgattctcagaaactcctttgtgatgtgtgcgttcacctcacagagtttaacttttcttttcatagagcagttagtaaacactctgtttgtaaagtctgcaagtggatattcagacctctttgaggccttcgttggaaacgggatttcttcatattctgctagacagaaaaattctcagtaacttccttgtgttgtgtgtattcaactcacagagttgaacgatcctttacacatagcagacttgaaacactctttttgtggaatttgcaagtggagatttcagccgctttcaggtcaatagtagaaaaggaaatatcttcgtagaaaaactagacagaatgattctcagaaactcctttgtgatgtgtgtgttcaactcacagagtttaacctttcttttcatagagcagttagtaaacactctgtttataaagtctgcaagtgtatattcagacccctttgaggccttcgttggaaacgggatttcttcatattatgctagacagaagaattctcagaaacttccttgtgttgtgtgtattcaactcacagagttgaacgatcctttacacacagcagacttgagacactctttttgtggaatttgtaagtggagatttcagccgctttgaggtcaatggtagaaaaggaaatatcttcatataaaaactagacagaatcattctcagaaactgctctgcgatgtgtgcgttcaactctcagagtttaactttgcttttcattcagcagtttggaaacactctgtttgtaaagtctgcacgtggatattttgaccacttagaggccttcgttggaaacgggtttctttcctgtaaggctagatagaagaattctcagtaacttccttgtgttgtgtacattcaactcacagagttgaacgttcccttagacagagcagatttgaaacactctttttgtgcaattggcaagtggtgatttcagccgatttgaggtcaatggtagaaaaggaaatatcttcgtagaaaaactagacagaatcattcccacaaactgcgttgtgatgtgttcgttcaactcacagagtttaaccattcttttcatagagcagttaggaaacagtctgtttgtaaattctgtaagtggatattctgacatcttgtggccttcgttggaaacgggatttcttcatattctgctagacagaaggattctcagtaacttccttgtgttgtgtgtattcaactcacagagttgaacgatcctttacacagagcagacttgaaacactctttttgtggaatttgcaagtgcagatttcagccgctttgaggtcaatggtagaaaaggagatatcttcgtataaaaactagacagaaatgattctcagaaactcctttgtgatgtgtgcgttcaactcacagagtttaacctttctgttcatagagcagttaggaaacactctgtttgtaaagtctgcaagtggatactcagaacctccttcaggcattcgttggaaacgggatttcttcatattctgctagacagaagaattctcagtaacttcccttgtgttgtgtgtattcaactgacagagttgaactttcagttagagagagcagatttgaaacactgtttttgtggaatttgcaagtggagatttcaagcgctttggggccaaaggcagaaaacgaaatatcttcgtataaaaagtagacagaatcattctcagaaactgctctgcgatgtgtgcgttcaactctcagagtttaacttttcttttcattcagcagtttggaaacactctgtttgtaaagtctgcacgtggatattttgaccagttagaggccttcgttggaaacgggtttttttcctgtaaggctagacagaagaattcccagtaacttccttgtcttgtgtacattcaactcacagagttgaacgttcccttagacagagcagatttgaaacactctttttgtgcaattggcaagtggagatttcaagcgctttaaggtcaatggcagaaaaggaaatatcttcgtttcaaaactagagagaatcattcccaaaaactgcgttgtgatgtgttcgttcatctcacagagtttaacctttcttttcatacagcagttaggaaacagtctgtttgtaaattctgtaagtggatattctgacatcttgtggccttcgttggaaacgggatttcttcatattctgctagacagaagaattctcagtaacttccttgtgttgtgtgtattcaactcacagagttgaacgatcctttacacagggcggacttgaaacactctttttgtggaatttgcaattggagatttcagccgctttgaggtcaatggtagaaaaggaaatatcttcgtataaaaactagacagaatgattctcagaaacttcattgtgacgtgtgcgttcaactcacagagtttaacatttcttttcatagagcagttaggaaacactctgtttgtaaagtctgcaagtggatattcagacctctctgaggccttcgttggaaacgggatttcttcatactgtgccaaacagaagaattcccagtaacttccttgtgttgtgtgtgttcaactcacagagttgaactttcatttacacagagcagattggaaacactctttttgtggaatttgcaagtggagatttcaagcgctttgagaccaaaagcagaaaaggaaatatcttcgtataaaaactagacagaatcattctcagaacctgctctgcgatgtgtgcgttcaactctcagagtttaacttttcttttcattcagcagtttggaaacactctgtttctaaagtctgcacgtggatattttgaccacttagaggccttcgttggaaacgggtttttttcctgtaaggcttgacagaagaattcccagtaacttccttgtgttgtgtacattcaactcacagagttgaacgttcccttagacagagcagatttgaaacactctttttgtgcaattggcaagtggtgatttcagccgctttgaggtcaatggtagaaaaggaaatatcttcgtataaaaactagacagaatgattctcagaaacttcattgtgatgtgtgcgttcaactcacagagtttaacctttcttttcatagagcagttaggaaacactctgtttgtaaactctgcaagtggatattcagacctctttgctgccttcgttggaaacgggatttattcatactgtgctagacagaagaattctcagtaacttccttctgttgtgtgtattcaactcacagagttgaacgatcctttacacagagcggacttgaaacactctttttgtggaatttgcaagtggagatttcagccgcgttgaggtcaatggtagaaaaggaaatatcttcgtataaaaattagacagaatgattctcataaactcctttgtgatgtgtgcattcaactcacagagtttcacctttcttttcatagagcagttgggaaacactctgtttgtaaagtctgcaagtagatattcagacctccttgaggccttcgttggaaacgggatttcttcatattctgctagacagaagaattctcagtaacttccttgtgttgtgtgtattcaactgacagagttgaactttcatttagagagagcagatttgaaacactgtttttgtggaagttgcaagtggagatttcaagcgctttggggccaagggcagaaaaggaaatatcttcgtataaaaactagacagataatcattctcagaaactgctctgcgatgtgtgcgttcaactctcagagtttaacttttcttttcattcagcagtttggaaacactctgtttgtaaagtctgcacgtggatattttgaccatttagaggccttcgttggaaacgggtttttttcttgtaaggctagacagaagaattcccaggaacttccttgtgttgtgtacattcaactcacagagttgaacgttcccttagacagagcagatttgaaacactctttttgtgcaattggcaagtggtgatttcagccgctttgaggtcaatggtagaaaaggaaatatcttcgtataaaaactagacagaatcattcccacaaactgcgttgtgatgtgttcgttcaactcacagagtttaacctttcttttcatagagtagttaggaaacactctgtttgtaaagtctgcaagtggatattcagacctctttgaggccttcgttggaaacgggatttcttcatgttctgccagacagaataattctcagtaacttccttgtgttgtgtgtattctactcacagagttgaacgatcctttacacagagcagacttgaaacactctttttgtggaatttgcaagtggagatttcagccgctttgaggtcaatggtagaataggaaatatcatcctatagaaactagaccgaatgattctcagaaactcctttgtgatatgtgctttcaactcatagagttcaacctttcttttcatagagcacttgggaaacactctgtttgtaaagtctgcaagtggatattcagacttctttgaggccttcgttggaagcgggatttcttcatgttctgctagacagaagaattctcagtaacttaccttgtgttgtgtgtattcaactcacagagttgaatgatcctttacacagaacagtcttgaaacactctttttgtggaatttgctagtggagatttcagccgctttgatgtcaatggtagaataggaaatatcttcctatagaaactagacagaatgattctcagaaactcctttgtgatgtgtgtgttcaactcacagagtttaacctttcttttcatagagcagttaggaaacactctgtttgtaaagtctgcaagtggatattcagacctttttgagaccttcgttggaaacgggattttttcatataaggctagacagaagaattcccagtaacttccttgtgttgtgtgtgttcaactcacagagttgaactttgatttacacagagcagatttgaaacactctttttgtggaatttgcaagtggagatttcaagcgctttgaggccaaaggcagaaaaggaaatatcttcgtatgaaaactagacagaatcattctcagaaactgctgcgtgatgtgtgcgttcaactctcagagtttaacttttcttttcattcagcggtttggaaacactctgtttgtaaattctgcacgtggaaattttgaccacttagaggccttcgttggaaacgggtttttttcatgtaaggctagacagaagaattcccagtaacttccttgtgttgtgtacattcaactcacagagttgaacgttcccttagacagagcagatttgaaacactctttttgtgcaattggcaaatggagatttcaagcgctttaaggtcaatggcagaaaaggaaatatcatcgtttcaaaactagacagaatcattcccacaaactgcgttgtgatgtgttcgttcaactcacagagtttaacctttctgttcatagagcagttaggaaacactctgtttgtaaagtctgaaagtggatattctgacatccttgtggccttcgttgggaacgggatttcttcatattctgctagacagaagaattctcagtaacttccttgtgttgtgtgtattcaactcacagagttgaacgatcctttacacagagcagacttgaaacactcttgttgtgtaatttgcaagtggagatttcagccgctttgaggtcaatggtagaataggaaatatcttcctatagaaactagacagaatgattctcagaaactcctttgtgatgtgtgcgttcaactcacagagtttaacctttcttttcatagagcagttaggaaacactctgtttgtaaagtctgcaagtggatatacagacctctttgaggccttcgttggaaaccggatttcttcatattctgctagagagaagaattctcagtaacttccttgtgttgtgtgtattcaacttacagaggtgaacgatcctttacacagagcagacttgaaacactctttttgtggaatttgcaagtggagatttcagccgctttgaggtcaatggtagaaaaggaaatatcttcgtataaaaactagacagaatgattctcagaaactcctttgtgatgtgtgtgttcaactcacagagtttaacctttcttttcatagagcagttaggaaacactctgtttgtaaagtctgcaagtggatattttgacctctttgaggccttcgttggaaacgggttttttcatgtaaggctagacagaagaattctcagtaacttccttgtgttgtgtgtattcaactgacagagttgaactatcatttagagagagcagatttgaaacactgtttttgtggaatttgcaagtggagatttcaagcgctttggggccaaaggcagaaaaggaaatatcttcgtataaaaactagacacaatcattctcagaaactgctctgcgaagtgtgcgttcaactctcagagtttaacttttcttttcattcagcagtttggaaacactctgtttgtaaagtctgcacgtggataatttgaccacttagaggccttagttggaaacgggtttttttcatgtaaggctagacagaagaattcccagtaacttccttgtgttgtgtgcattcaactcacagagttgaactttcctttagacagagcagatttgaaacactctatttgtgcaatttgcaagtgtagatttcaagcgctttaaggtcaatggcagaaaaggaaatatcttcgtttcaaaactagacagaatcattcccacaaactgcgttgtgatgtgttcgttcaactcacagagtattaacctttctgttcatagagcagtgaggaaacactctgtttgtaaagtctgtaagtggatattctgacatcttgtggccttcgttggaaacgggatttcttcatattctgctagacagaagaattctcagtaacttctttgtgttgtgtgtattcaactcacagagttgaacgatcctttacacagagcagacttgaaacactctttttgtggaatttgcaagtggagatttcagccgctttgaggtcaatggtagaataggaaatatcttcctatagaaactagacagaatgattctcagaaactcctttgtgatgtttgcgttcaactcacagagtttaacatttcttttcatagagcagttaggaaacactctgtttatatagtctgcaagtggatattcagacctccttgaggccttcgttggaaacggggtttcttcatattctgctagacagaagaattctcagtaacttccttctgttgtgtgtattcaactgacagagttgaactttcatttagagagagcagatttgaaacactgtttttgtggaatttgcaagtggagatttcaagcgctttggggccaaaggcagaaaggaaatatcttcgtataaaaactagacagaatcattctcagaaactgctctgtgatgtgtgcgttcaactctcagagtttaacttttcttttcattcagcagtttggaaacactctgtttgtaaagtctgcacgtggatattttgaccacttagaggccttcgttggaaacgggttttcttcatgtaaggctagacagaagaattcccagtaacttccttgtgttgtgtgcattcaattcacacagatgaacgttcccttagacagagcagatttgaaacactctatttgtgcaatttgcaagtgtagatttcaagcgctttaaggtcaatggcagaaaaggaaatatcttcgtttcaaaactagacagaatgattctcagaaactcctttgtgatgtgtgcgttcaactcacagagtttaacctttcttttcatagagcagttaggaagcactctgttagtaaagtctgcaagtggatattcagacctccttgaggccttcgttggaaaggggatttcttcatattatgctacacagaagaattctcagtaactttccttgtgttgtgtgtattcaactcacagagttgaacgatcctttacacagagcagacttgaaacactctttttgtggcatttgcaagtggagatttcagccgctttgagttcaatggtagaataggaaatatcttcctatagaaactagacagaatgattctcagaaactcctttgtgatgtgtgtgttcaactcacagagtttaacctttcttttcatagagcagttgggaaacactctgtttgtaaagtctgcaagtggatattcagacatccttgaggctttcgttggaaacgggatttcttcatattctgctagaaagaagaattctcagaatcttccttgtgttgtgtgtattcaactcacagagttgaacgatcctttacacagagcagacctgaaacactctttttgtggaatttacaagtggagatttcagccgctttgaggtcaatggtagaaaaggaaatatcttcgtataaaaactagacagaatgattctcagaaactcctttgtgatgtgtgcgttctactcacagagtttaacctttcttttcatagagcagttaggaaacactctgtttgtaaagtctgcaagtggatattcagacatctttgagactttcgttggaaacgggatttcttcatattctgctagacagaagaattcccagtaacttccttgtgttgtgtgtgttcaactcagagagttgaactttcatttacacagagcagatttgaaacactctttttgtggaatttgcaagtggagatttcaagcgctttgaggccaaaggcagaaaaggaaatatcttcgtataaaaactagacagaatcattctcagaaacttctctgcgatgtgtgcgttcaactctcagagtttaacttttcttttcgttcagcagtttggaaacactctgtttgtaaagtctgcacgtggatattttgaccacttagaggccttcgttggaaacgggtttttttcctgtaaggctagacagaagaattcccagtaacttccttgtgttgtgtacattcaactcacagagttgaacgttcccttagacagagcagatttgaaacactctttttgtgcaattagcaagtggagatttcaagcgctttaaggtcaatggcagaaaaggaaatatcttactttcaaaactagacagaaatcattcccacaaactgcgttgtgatgtgttcgttcaactcacagagtttaacctttctgttcatagagcagttaggaaacactctgtttgtaaagtctgtaagtggatattctgatatcttgtggccttcgttggaaacgggatttcttcatattctgctagacagaagcaattctcagtaacttccttgtgttgtgtgtattcaactcacagagttgaaggatcctttacagagggcaggcttgaaacactctttttgtcgaatttgcaagtggagatttcagccgctttgaggtcaatggtagaataggaaatatcttcttatagaaactagacagaacgattctcagaaactcctttgtgatgtgtgcgttcaactcacagagtttaacctttcttttcatagagcagttacgaaacactctgtttgtaaagtctgcaagtggatattcagacctctttgaggccttcgttggaaacgggatttcttcatattctgctagacagaagaattctcagtaacttccttgtgttgtgtttattcaactcacagagttgaatgatcctttacacagagcagacttgaaacactctttttgtggaatttgcaagtggagatttcagccgctttgaggtcaatggtagaaaagtaaataccttcctataaagactagacagaatgattctcagaaactcctttgtgatgtgtgccttcaactcacagagtttaacctttcttttcatagagcagttaggaaacactctgtttgtaaagtctgcaagtggatattcagacctctttgaggccttcgttggaaacgggtttttttcatataaggctagacagaagaattctcagaaactttccttgtgttgtgtgtattcaactcacagagtagaacgatcctttacacagagcagacttgaaacactctttttgtggaatttgcaagtggagatttcagccgatttgaagtcaatggtagaaagggaaatatcttcgtatagaaactagacagaattattctcagaaactcctttgtgatgtgtgcgttcaactcacagagtttaacctttctgttcatagagcagttaggaaacactctgtttgtaaagtctgcaagtggatattcagacctccttgaggccttcgttggaaacgggatttcttcatattctgctagacagaagaattctcagaaacttccttgtgttgtgtgtattcaactcacagagttgaaggatcctttacacagagcagacttgaaacactctttttgtggaatttgcaagtggagatttcagccgctttgtggtcaatggtagaaaaggaaatatcttcgtataaagactagacagaatgattctcagaaacttctttgtgatgtgtgcgttcagctcacagagtttaacctttcttttcatagagcagttaggaaacactctgtttgtaaactctgcaagtggatattcagacctctttgaggccttcgttggaaacgggatttcttcatactatgctagacagaagaattcccactaacttccttgtgttgtgtgtgttcaactcacagagttgaactttcatttacacagagcagatttgaaacactctttttgtggaatttgcaagtggagatttcaagcgctgtgaggccaaaggcagaaaaggaagtatcttcgtataaaaactagacagaatcattctcagaaactgctctgtgatgtgtgcgttcaactctcagagtttaacttttcttttcattcagcagtttggaaacactctgtttgtaaagtctgcacgtggataatttgaccacttagaggccttcgttggaaacgggtttttttcatgtaaggctagacagaagagttctcagtaacttccttgtgttgtatgtattcaactcacacagttgaacgatcctttacagagagcagacttgtaacactctttttgtggaatttgcaagtggagatttcagccgctttgaagtcaaagtagaaaaggaaatatcttcctataaaaactagacagaatgattctcagaaaatcttttgtgatgtgtgcgttcaactcacagagtttaacttttcttctcatagagcagttaggaaacactctgtttgcaaagtctgcaagtggatattcagacctctttgaggccttcgttggaaacgggatttcttcaaattatgctagacagaagaattctcagtaacttccttgtgttgtgtgtattcaactcacagagttgaacgatcctttacacacagcagacttgaaacactctttttgtgtaatttgcaactggagatttcagccgctttgaggccaatagtagaaaaggaagtatcttcgtagaaaaactagacagaatgattctcagaaaatcttttgtgatgtgtgcgttcaactcacagagtttaacttttcttctcatagagcagttaggaaacactctgtttgtaaagtctgcatgtggatattcagacctctttgaggccttcgttggaaacgggatttctacatattatgctagacagaagaattctcagtaacttccttgtgttgtgtgtattcaactgacagagttgaactttcatttagagagagcagatttgaaacactgtttttgtggaatttgcaagtggagatttcaagcgctttggggccaaaggcacaaaaggaaatatcttcgtataaaaactagacagaatcattctcagcaaactgctgcgtgatgtgtgcgttcaactctcagagtttaacttttcttttcattcagcggtttggaaacactctgtttgtaaagtctgcacgtggaaattttgaccacttagaggccttcgttggaatcgggtttttttcatgtaaggctagacagaagaattcccagtaacttccttgtgttgtgtacattcaactcacagagttgaacgttcccttagacagagcagatttgaaacactctttttgtgcaattggcaagtggagatttcaagcgctttaaggtcaatggcataaaaggaattatcttcgtttcaaaactagacagaatcattcccaaaaactgcgttgtgatgtgttcgttcaactcacagagtttaacctttctgttcatagagcagttaggaaacactctgtttgtaaagtctgtaagtagatattctgacatcttgtggccttcgttggaaacgggatttcttcatattctgctagacagaagaaatctcagtaacttccttgtgttgtgtgtattcaactcacagagttgaacgatcctttacacagagcggacttgaaacacactttttgtggaatttgcaagtggagatttcagccgcgttgaggtcaatggtagaaaaggaaatatcttcgtataaaaactagacagaatgattctgagaaactcctttgtgatgtgtgcgttcaactcacagagtttaacctttcttttcatagagcagttaggaaacactctgtttgtaatgtgtgcaagtggatattcagacctccttgaggcctttgttggaaacgggatttcttcatattatgctagacaaaagaattctcagtaacttccttgtgttgtgtgtattcaactcacagagttgaacgatcctttacacagattggacttgaaacactctttttgtggaatttgcaagtggagatttcagccgcgttgaggtcaatggtagaaaaggaaatatcttcgtataaaaactagacagaatgattctcagaaactcctttgtgatgtgtgtgttcaactcacagagtttaacctttcttttcatagagcagttaggaaacactctgtttgtaaagtctgcaagtggatattcagacctctttgaggccttcgttggaaacgggattttttcatataaggctagacagaagaattcccagtaactttccttgtgttgtgtgtgttcaactcacagagttgaactttcatttacacagagcagatttgaaacactctttttgtggaatttgcaagtggagatttcaagcgctttgaggccaaaggcagaaaaggaaatatcttcgtttgaaaactagacagaatcattctcagaaactgctctgcgatgtgtgcgttcaactctcagagtttaacttttcttttcattcagcagtttggaaacactctgtttgtaaagtctgcacgtggataacttgaccacttagaggccttcgttggaaacgggttttttcatgtaaggctagacagaagaattcccagtaacttccttgtgttgtgtacattcaactcacagagttgaacgttcccttagacagagcagatttgaaacactctttttgtgcaattggcaagtggagatttcaagcgcttaaggtcaatggcagaaaaggaaatatcttcgtttcaaaactagacagaatgattctcagaaactcctttgtgatgtgtacgttcaactcacagagtttaacctttcttttcatagagcagttaggaaacactctgtttgtaaattctgtaagtggatattctgacatcttgtggccttcgttggaaacgggatttcttcatattctgctagacagaagaattctcagtagcttccttgtgttgtgtactttcaactcacagagttgaacgatcctttacacaggagcagattagaaacactctttttgtggaatttgcaagtggagatttcagccgctttgaggtcaatggtagaaaaggaaatatcttcataaaaaaactagacagaatgattctcagaaactcctttgtgatgtgtctgttcaactcacagagtttaacctttcttttcatagagcagttaggaaacactctgtttgtaaagtctgcaagtggatattcagacctctttgaggccttcgttggaaacgggtttttttcatataaggctagacagaagaattcccagtaacttccttgtgttgtgtgtgttcaactcacagagttgaactttcatttacacagagcagattggaaacactctttttgtggaatttgcaagtggagatttcaagcgctttgaggccaaaggcagaaaaggaaatatcttcgtataaaaactagaccgaatcattctcagaaactgctctgtgatgtgtgcgttcaactctcagagtttaacttttcttttcattcagcagtttggaaacactctgtttgtaaagtctgcacgtggataatttgaccacttagaggccttcgttggaaacgggtttttttcatgtaaggctagacagaagatttctcagtaacttccttgtgttgtgtgtattcaactcacacagttgaacgatcctttacacagagcagacttgtaacactctttttgtggaatttgcaagtggagatttcagccgctttgaagtcaaaggtagaaaaggaaatatcttcctataaaaactagacagaatcattcccacaaactgcgttgtgatgtgttcgttcaactcacagagtttaacctttctgttcatagagcagttaggaaacactctgtttgtaaagtctgtaagtggatattctgacatcttgaggccttcgttggaaacgggatttcttcatattctgctagagagaagaattctcagaaacttccttgtgttgtgtgtattcaactcacagagttgaacgatcctttacacagagcagacttgaaacacactttttttggtattttcaagtggagatttcagcagctttgagttcaatggtagaaaaggaaatatattcgtataaagactagacagaatgattctcagaaactactttgcgatgtgtgcgttcaactcacagagtttaacctttcttttcatagagcagttaggaaacactctgtttgtaaagtctgcaagtggatattcagacctccttgaggccttcgttggaaactggatttcttcatattatgctagacagaataattctcagtaacttccttgtgttgtgtgtattcaactcacagagttgaaggatcctttacagagagcaggcttgaaacactctttttctcgaatttgcaagtggagatttcagctgctttgaggtcaatggtagaataggaaatatcttcttatagaaactagacagaatcattctcagaaactgctctgcgatgtgtgcgttcaactctcagagtttaacttttcttttcattcagcagtgtggaaacactctgtttgtaaagtctgcacgtggatattttgaccacttagaggccttcgttggaaacgggtttttttccctgtaaggctagacagaagaattcccagtaacttccttgtgttgtgtgcattcatctcacagagttgaacgttcccttagacagagcagatttgaaacactctatttgtgcaatttgcaagtgtagatttcaagcgctttaaggtcaatggcagaaaaggaaatatcttcgtttcaaaactagacagaatcattcccacaaactgcgttgtgatgtgttcgttcaactcacagagtttaaccttccttttcatagagcagttaggaaacactctgtttgtaaagtctgcaagtggatattcagacctccttgaggccttcgttggaaacgggatttcttcatattctgctagacagaagaattctcagtaacttccttgtgttgtgtgtattcaactcacagagttgaacgatcctttacacagagcagacttgaaacactctttttgtggaatttgcaagtggagatttcatccgctttgaggtcaatggtagaataggaaatatcttcctatagaaaatagacagaatgattctcagaaactccgttgtgatgtgtgcgttcaactcacagagtttaacctttcttttcatagagcagttgggaaacactctgtttgtaaagtctgcaagtggatattcagacctccttgaggctttcgttggaaacgggatttcttcatattctgctagaaagaagatttctcagaaacttccttgtgttgtgtgttttcaactcacagagttgaacgatcctttacacagagcagacttgaaacactctttttgtggaatttgcaagtggagatttcagccgctttgaggtcaattgtagaaaaggaaatatcttcgtataaaaactagacagaatgattctcagaaactcctttgtgatgtgtgcattcaactcacagagtttaacctttcttttcatagagcagttaggaaacactctgtttgtaaagtctgcaagtggatattcagacctctttgatgccttcgttggaaacgggatttcttcatattctgctagacagaagaattcccagtaacttaccttgtgttgtgtacattcaactcacagagttgaacgttcccttagacagagcagatttgaaacactctttttgtgcaattggcaagtggagatttcaagcgctttaaggtcaatggcagaaaaggaaatatcttcgtttcaaaactagacagaatcattcccacaaactgcgttgtgatgtgttcgttcaactcacagagtttaacctttctgttcatagagcagtcaggaaacactctgtttgtaaagtctgtaagtggatattctgacatcttgtggccttcgttggaaacgggatttcttcatattctgctagacagaagaattctcagtaacttccttgtgttgtgtttattcaactcacagaggtgaatgatcctttacacagagcagacttgaaacactctttttgtggaatttgcaagtggagatttcagccgctttgaggtcaatggtagaaaagtaaatatcttcgtataaagactagacagaatgattctcagaaactcctttgtgatgtgtgcgttcaactcacagagtttaacttttcttttcatagagcagttaggaaacactctatttgtaaagtctgcaagtggatattcagacctctttgaggccatcgttggaaacgggatttcttcatattatgctagacagaagaattctcagtaacttccttgtgttgtgtgtattcaactcacagagttgaacgatcctttacacagagcagacttgaaacactctttttgtggaatttgcaagtggagatttcagccgctttgaggtcaatggtagaataggaactatcttcctatagaaactagacagaacgattctcagaaactcctttgtgatgtgtgcgttcaactcacagagtttaacctttcttttcatagagcagttaggaaacactctgtttgtaaagtctgcaagtggatattcagacccctttgaggcctgcgttggaaacgggatttcttcatattctgctagacagaagaattcccagtaacttccttgtgttgtgtgtgttcaactcacagagttgaactttgatttacacagagcagatttgaaacactctttttgtggaatttgcaagtggagatttcaagcgctttcaggccaaaggcagaaaaggaaatatcttcgtataaaaactagacagaatcattctcagaaactcctctgcgatctgtgcgttcaactctcagagtttaacttttcttttcattcaccagtttggaaacactctgtttgtaaagtctgcacgtggatattttgaccacttagaggccttcgttggaaacgggtttttttcctgtaaggctagacagaagaattcccagtaacttccttgtgttgtgtgcattcaactcacagagttgaacgttcccttagacagagcagatttgaaacactctatttgtgcaatttgcaagtgtagatttcaagtgtttaaggtcaatggcagaaaaggaaatatcttcgtttcaaaactagacagaatcattcccacaaactgcgttgtgatgtgttcgttcaactcacagagtttaacctttcttttcatagagcagttaggaaacactctgttggtaaattctgtaagtggatattctgacatcttgtggccttcgttggaaacgggatttcttcatattctgctacacagaagaattctcagaatcttccttgtgttgtgtgtattcaactcacagagttgaacgatcctttacacagagcagacttgaaacactctttttgtagaatttgcaagtggagatttcagccgctttgaggtcaatggtagaaaaggaaatatcttcgtataaaaactagacagaatgattctcagaaactcctttgtgatgtgtgcgttcaactcacagagtttaaacctttcttttcatagagcagttaggaaacactctgtttgtaaagtctgcaagtggatattcagacatctttgaggctttcgttggaaacgggatttcttcatattctgctagacagaagaattctcagtaacttccttgtgttgtgtgtattcaactcacagagttgaacgatcctttacacagagcaggcttgaaacactctttttgtggaatttgcaagtggagatttcagccgctttgagttcaatggtagaaatggaaatatcttcctatagaaactagacagaatgattctcagaaacttctttgtgatgtgtgtgttcaactcacagagtttaacctttcttttcatagagcagttaggaaacactctgtttgtaaagtctgcaagtggatattcagacctctttgaggccttcgttggaaacgggtttttttcatataaggctagacagaagaattcccagtaacttcccttgtgttgtgtgtgttcaactcacagagttgaactttcatttacccagagcagatttgaaacactctttttgtggaatttgcaagtggagatttcaagcgctttgaggccaaaggcagaaaaggaaatatcttcgtttcaaaactagacagaatcattctcataaactgctgcgtgatgtgtgcgttcaactctcagagtttaacttttctttttattcagcggtttggaaacactctgtttgtaaagtctgcacgtggatattttgaccacttagaggccttcgttggaaacgggtttttttcatgtaaggctagacagaagaattcccaataacttccttgtgttgtgtacattcaactcacagagttgaacgttcccttagacagagcagatttgaaacactctttttgtgcaattggcaagtggagatttcaagcgctttaaggtcaatggcagaaaaggaaatctcttcgtttcaaaactagacagaaatcattcccacaaactgcgttgtgatgtgttcgttcaactcacagtagtttaacctttctgttcatagagcagttaggaaacactctgtttgtaaagtctgtaagtggatattctgacatcttgtggccttcgttggaaacgggatttcttcgtattctgctagacagaagaattctcagtaacttccttgtgttgtgtgtattcaactcacagagttgaacgatcctttacacagagcggacttgaaacacactttttgtggaatttgcaagtggagatttcagccacgttgaggtcaatggtagaaaaggaaatatcttcgtataaaaactagacagaatgattctcagaaactcctttgtgatgtgtgtgttcaactcacagagtttaacctttcttttcatagagcagttaggaaacactctgtttgtaaagtctgcaagaggatattcagacctctttgaggccttcgttggaaacgggtttttttcatataaggctagacagaagaattcccagtaacttccttgtgttgtgtgtgttcaactcacagagttgaactttcatttacacagagcagatttgaaacactctttttgtggaatttgcaagtggagatttcaagcgctttgaggccaaaggcagaaaaggaaatatcttcttttcaaaactagacagaatcattctcagaaactgctctgcgatgtgtgcgttcaactctcagagtttaacttttcttttcattcagcagtttggaaacactctggttgtaaagtctgcacgtggataacttgaccacttagaggccttcgttggaaacgggtttttttcctgtaaggctagacagaagaattcccagtaacttccttgtgttgtgtacattcaactcacagagttgaacgttcccttagacagagcagatttgaaatactctttttatgcaattggcaagtggaaatttcaagcgctttaaggtcaatggcagaaaaggaaatatcttcgtttcaaaactagacagaatcattcccacaaactgcgttgtgatgtgttcgttcaactcacagagtttaacctttctgttcatagagcagttaggaaacactctgtttgtaaagtctgtaagtggatattctgacatcatgtggccttcgttggaaacgggatttcttcatattctgctagacagaagaattctcagtaacttccttgtgttgtgtttattcaactcacagagttgaatgatcctttacacagagcagacttgaaacactctttttgtggaatttgcaagtggagatttcagccgctttgaggtcaatggtagaaaagtaaatatcttcggataaacactagacagaatgattctcagaaactcctttgtgatgtgtgtgttcaactcacagagtttaacttttcttttcatagagcagttaggaaacactctgtttgtaaagtctgcaagtggatattcagacctctttgaggccttcgttggaaacgggatttcttcatattctgctagacagaagaattcccagtaacttccttgtgttgtgtgtgttcaactcacagagttgaactttcatttacacagagcagatttgaaacactctttttgtggaatttgcaagtggagatttcaagcgctttgaggccaaaggcagaaaaggaaatatcttcgtttcaaaactagactgaatcattctcagaaactgctctgcgatgtgtgcgttcaactctcagagttcaacttttcttttcattcagcagtttggaaacactctgtttgtaaagtctgcacgtggataatttgaccacttagaggccttcgttggaaacggtttttttttcatgtaaggctagacagaagaatttcccagtaacttccttgtgttgtgtgcattcaactcacagagttgaacgttcccttagacagagcagatttgaaacactctatttgtgcaatttgcaagtgtagatttcaagcgctttaaggtcaatggcagaaaaggaaatatcttcgtttcaaaactagacagaatcattcccacaaactgcgttgtgatgtgttcgttcaactcacagaagtttaacctttcttttcatagagcagttaggaaacagtctgtttgtcaattctgtaagtggatattctgacatcttgtggtcttcgttggaaacgggatttcttcatattctgctagacagaagaattctcagtaacttccttgtgttgtgtgtattcaactcacagagttgaacgatcttttacacagagcagacttgaaacattctttttgtggaatttgcaagtggagatttcagccgctttgaggtcaatggtagaataggaaatatcttcctatagaaactagacagaatgattctcataaactcctttgtgatgtgtgcattcaactcacagagtttcacctttcttttcatagagcagttaggaaacactctgtttgtaaagtctgcaagtggatattcaggcctcttgaggccttcgttggaaacgggatttcttcatattctgctagacagaataattctcagtaacttccttctgttgtgtgtattcaactcacagagttgaaggatcctttacagagagcaggcttgaaacactctttttgtcgaatttgcaagtggagatttcagccgctttgaggtcaatggtagaataggaaatatcttcttatagaacctagacaaaatgattctcagaaacttctttgtgatgtgtgcgttcaactcacagagtttaacctttcttttcatagagcagttaggaaacactctgtttgtaaactctgcaagtggatattcagacctctttgaggccttcgttggaaacgggatttcttcatactatgatagacagaagaattctcagtaacttctttgtgttgtgtgtattcaactcacagagttgaacgatcctttacacagagcagacttgaaacactctatttgtagaatttgcaagtggagatttcagccgctttgaggtcaatagtagaaaaggaaatatcttcgtagaaaaactagacagaacgattctcagaaactcctttgtgatgtgtgcgttcaactcacagagtttaacctttcttttcatagagcagttaggaaacactctgtttgtaaagtctgcaagtggatattcagacctctttgagaccttcgttggaaacgggatttcttcatattctgctagacagaagaattctcagtaactttccttgtgttgtgtgtattcaactgacagagttgaactttcatttagagagagcagatttgaaacactgtttttgtggaatttgccagtggagatttcaagcgctttggggccaaaggcagaaaaggaaatatcttcgtataaaaactagacagaatcattctcagaaactgctctgcgatgtgtgccttcagctctcagagtttaacttttcttttcattcagcagtttggaaacactctgtttgtaaagtctgcacgtggatattttgaccacttagaggtcttcgttggaaacgggtttttgtcatgtaaggctagacagaagaattcccagtaacttccttgtgttgtgtgcattcaactcacagagttgaacgttcccttagacacagcagatttgaaacactctatttgtgcaatttgcaagtgtagatttcaagcgctttaaggtcaatggcagaaaaggaaatatcttcgtttcaaaactagacagaatcattcccacaaactgcgttgtgatgtgttcgttcaactcacagagtttaacctttctgttcatagagcagttaggaaacactctgtttgtaaagtctgtaagtggatattcagacctccttgaggctttcgttggaaacgggatttcttcatattctgctagacagaggaattctcagtaacttccttgtgttgtgtgtattcaactcacagagttgaacgatcctttacccagagcagacttgaaacactctttttgtggaatttgcaagtggagatttcagccgctttgaggtcaatggtagaataggaaatatcttcctatagaaactagacagaattattctcagaaactcctttgtgatgtgtgcgttcaactcacagagtttaacctttcttttcatagagcagttaggaaacactctgtttgtaaagtctgcaagtggatattcagacctctttgaggccttcgttggaaacgtgatttcttcatattctgctagacagaaagaattctcagtaacttccttgtgttgtgtgtattcaactcacagagttgaacgatcctttacacagagcagacttgaaacactctttttgtggaatttgcaagtgaagatttcagccgctttgaggtcaatggtagaataggaaatatcttcctatagaaaatagacagaatgattctcagaaactcccttgtgatgtgtgcgttcaactcacagagtttaacctttcttttcatagagcagttaggagacactctgtttgtaaagtctgcaagtggatattcggacctctttgaggccttcattggaaacgggatttcttcatattctgctagacagaagaattctcagtaacttctttgtattgtgtgtattcaactcacagagttgaacgatcctttacacagagcagacttgaaacactctttttgtggaatttgcaagtggagatttcatccgatttgaggtcaatggtagaataggaaatatcttcctatggaaactagacagaatgattctcagaaactcctttgtgatgcgtgtgttcaactcacagagtttaacctttcttttcatagagcagttagtaaacactctgtttataaagtctgcaagtggatattcagacccctttgaggccttcgttggaaacgggatttcttcatattatgctagacagaagaattctcagtaacttccttgtgttgtgtgtattcaactgacagagttgaactttcatttagagagagcagatttgaaacactgtttttgtggaatttgcaagtggagatttcaagcgctttggggccaaaggcagaaaaggaaatttcttcgtataaaaactagacagaatcattctcagaaactgctgcgtgatgtgtgcgttcaactctcagagtttaacttttcttttcattcagcggtttggaaatactctgtttgtaaagtctgcacgtggacattttgaccacttagaggccttctttggaaacgggtttttttcatgcaaggctagacagaagaattcccagtaacttccttgtgttgtgtgcattcaactcacagagttgaacgttcccttagacagagcagatttgaaacactctatttgtgcaatttgcaagtgtagatttcaagcgcattaaggtcaatggcagaaaaggaaatatcttcgtttcaaaattagacagaatcattcccacaaactgcgttgtaatgtgtgcgttcaactcacagagtttaacctttcttttcatagagcagttaggaaacactctgtttgtaaagtctgcaagtggatattcagacctctttgaggccttcgttggaaacgggatttcttaatattctgctagacagaagaattctcagtaacttccttgtgttgtgtgtattcaactcacagagttgaacgatcctttacaaagagcagacttgaaacactctttctgtggaatttgcaattggagatttcagccgctttgaggacaatggtagaataggaaatatcttcctatagaaactagacagaatgattctcataaactcctttgtgatgtgtgcgttcaactcacagagtttaacctttcttttcatagtgcagttaggaaacactctgtttctaaactctgcaagtggatattcagacatccttgaggccttcgttggaaacgggatttcttcatattctgctagacagaagaattctcagtaacttccttgtgttgtgtgtattcaactcacagagttgaacgatcctttacacagagcacacttgaaacactccttttgtggaatttgcaagtggagatttcagccgctttgaggtcaatagtagaaaaggaaatatcttcgtagaaaaactagacagaatgattctcagaaacttctttgtgatgtgtgcgttcaactcacagagtttatcctttcttttcatagagcagttaggaaacactctgtttgtaaactctgcaagtggatattcagacctctttgaggccttcgttggaaacgggatttctccatactgtgctagacagaagaattctcagtaacttcccttgtgttgtgtgtattcaagtgacagagttgaactttcatttagagagagcagatttgaaacactgtttttgtggaatttgcacgtggagatttcaagcgctttggggccaaaggcagaaaaagatatatcttcgtataaaaactagacagaatcattctcagaaactgctctgcgatgtgtgcgttcaactctcaggagtttaacttttcttttcattcagcagtttggaaacactctgtttgtaaagtctgcacgtggatattttgaccacttagaggccttcgttggaaatgggtttttttcctgtaaggctagacagaagaattcccagtaacttccttgtgttgtgtacattcaactcacagagttgaacgttcccttagacagagcagatttgaaacactctttttgtgcaattggcaaatggagatttcaagcgctttaagttcaatggcagaaaaggaaatatcttcgtttcaaaactagacagaatcattcccacaaactgcgttgtgatgtgttcgttcaactcacagagtttaacctttctgttcatagagcagttaggaaacactctgtttgtaaagtctgtaagtggatattcggacatcttgtggccttcgttggaaacgggatttcttcatattctgctacacagaagaattctcagaatcttccttgtgttgtgtgtattcaactcacagagttgaacgatactttacacagagcagacttgaaacactctttttgtggaatttgcaagtggagatttcagccgctttgaggtccatggtagaaaaggaaatatcttcgtataaaaactagacagaatgattctcagaaactcctttgtgatgtgtgcgttcaactcacagagtttaacctttcttttcatagagcagttaggaaacactctgtttgtaaagtctgcaagtggatattcggacctctttgaggccttcgttggaaacgggtttttttcatataaggctagatagaagaattctcagtaacttccctgtgttgtgtgtattcaactcacagagttgaacgatcctttacacagagcagacttgtaacactctttttgtggaatttgcaagtggagatttcagccgctttgaagtcaaaggtagaaaaggaaatatcttcctataaaaactagacagaatcattctcagaaactgctgcgtgatgtgtgcgttcaactctcagagtttaacttttcttttcattcagcggtttggaaacactctgtttgtaaagtctgcacgtagatattttgaccacttagaggccttcgttggaaacgggtttttttcatgtaaggctagacagaagaattcccaggaacttccttgtgttgtgtacattcaactcacagagttgaacgttcccttagacagagcagatttgaaacactgtttttgtgcaattggcaagtggtgatttcagccgctttgaggtcaatggtagaaaaggaaatatcttcgtataaaaactagacagaatgattctcagaaactcctttgtgatgtgtgcgttcaactcacagagtttaacctttcttttcatagagcagttaggaaacactctgtttgtaaattctgcaagtggatattcagacctccttgaggccttcgttggaaacgggatttcttcatattctgctatacagaagaattctcagaaacttccttgtgttttgtgtattcaactcacagatttgaacgatcctttacacagagcagacttgaaacactctttttctggaatttgcaagtggagatttcagccgctttgaggtcaatggtagaaaaggaaatatcttcgtataaaaactagacagaatgattctcagaaactcctttgtgatgtgtgtgtccaactcacagagtttaacctttcttttcatagagcagttaggaaacactctgtttgtaaagtctgcaagaggatattcagacctctttgaggccttctttggaaacgggattttttcatataaggctagacagaagaattcccagtaacttccttgtgttgtgtgtgttcaactctgtgagttgaactttcatttacacagagcagattggaaacactctttttgtggaatttgcaagtggagatttcaagcgctttgaggccaaaggcagaaaaggaaatatcttcgtataaaaactagacagaattattctcagaaactgctgcgtgatgtgtgcgttcaactctcagagtttaacttttcttttcattcagcggtttggaaacactctgtttgtaaagtctgcacgtggatattttgaccacttagaggccttcgttggaaacgggttttttttcatgtaaggctagacagaagaattctcaataacttccttgtgttgtgtgtattcaactgacagagttgaaccttccttcagacagagcagatttgcaacagtctttttgtgtaatttgcaagtggagatttcaagcgctttgaggccaaaggcagaaaaggaaatatcttcgtataaaaactagacagaatgattctcagaaactcctttgtgatgtgtatgttcaacttacagagtttaacttttctattcatagagtagttaggaaacactctgtttgtaaagtctgcaagtggatattttgacctctttgaggccttcgttggaaacgggtttttttcatgtaaggctagacagaagaattctcagtaacttccgcgtgttgtgtgtattcaactcacagagttgaacgatcctttacacagagcagacttgtaacactctttttgtggaatttgtaagtggagatttcagccgctttgaagtcaaaggtagaaaaggaaatatcttcctataaaaactagacagaatgattctcagaaactcctttgtgatgggtgcgttcaactcacagagtttaacctttcttttcatagagcagttaggaaacactctgtttgtaaagtctgcaagtggatattcagacctctttgagaccttcgttggaaacgggtttttttcatataaggctagacagaagaattctcagtaacttccttgtgttgtgtgtgttcaactcacagagttgaactttcatttacacagagcagatttgaaacactctttttgtggaatttgcaaatggagatttcaagcgctttgaggccaaaggcagaaaaggaaatatcttcgtataaaaactagacagaatcattctcagaaactgctctgtgatgtgtgcgttcaactctcagagtttaacttttgttttcattcagcagtttggaaacactctgtttgtaaagtctgcacgtggatattttgaccacttagaggcattcgttggaaacgggtttttttcatgtaaggctagacagaagaattcccagtaacttccttgtgttgggtgcattcaactcacagagttgaacgttcccttagacagagcagatttgaaacactctatttgtgcaatttgcaagtgtagatttcaagcgctttaaggtcaatggaagaaaaggaaatatcttcgtttcaaaactagacagaatcattcccacaaactgcgttgtgatgtgttcgttcaactcacagagtttaacctttctgttcatagagcagttaggaaacactctgtttgtaaagtctgtaagtggatattctgacatcttgtggccatcgttggaaacgggatttcttcatattctgctagacagaagaattctcagaaacttccttgtgttgtgtgtattcaactcacagagttgaacgatcgtttacacagagcagacttgagacactctttttgtggaatttgtaagtggagatttcagccgctttgaggtcaatggtagaaaaggaaatatcttcgtataaaaactagacagaacgattctcagaaactcctttgtgatgtgtgcgttcaactcacagagtttaacctttcttttcatagagcagttaggaaacactctgtttataaagtctgcaagtggatattcagacccctttgaggccttcgttggaaacgggatttcttcatattatgctagacagaagatttcccagtaacttccttgtgttgtgtgtgttcaactcacagagttgaactttcatttacacagagcagatttggaacactctttttgtggaatttgcaaatggagatttgaagcgctttgaggccaaaggcagaaaaggaaatatcttcgtataaaaactagacagaatcattctccgaagctgctgactgatgtgtgcgttcaactctcagagtttaacttttcttttcattcagcggtttggaaacactctgtttgtgaagtctgcacgtggatattttgaccacttagaggccttcgttggaaacgggttttttgcatgtaaggctagacagaagaattctcagtaacttccttgtgttgtgtgcattcaactcacagagttgaacgttcccttagacacagcagatttgaaacactctatttgtgcaatttgcaagtgtagatttcaagcgctttaaggtcaatggcagaaaaggaaatatcttcgtttcaaagctagacagaatcattcccacaaactgcgttgtgatgtgttcgtacaactcacagagtttaacctttctgttcatagagcagttaggaaacactctgtttgtaaagtctgtaagtggatattctgacatcttgtggccttcgttggaaacgggatttcttcatattctgctagacagaagaattctcagtaacttccttgtgttgtgtttattcaactcacagagttgaatgatcctttacacagagcagacttgaaacactctttttgtggaatttgcaagtggagatttcagccgctttgaggtcaatggtaggaaaggaaatatcttcgtataaagactagacagaatgattctcagaaactcctttgtgatgtgtgcgttcaactcacacagtttaacctttcttatcatagagcagttaggaaacactctgtttgtaaagtctgcaagtggatattccgacctccttgaggccttcgttggaaacgggatttcttcatattatgctagacagaagaattctcagtaacttccttgtgttgtgtgtattcaactcacagagttgaacgatcctttacacagagcagatttgaaacactctttttgtggaatttgcaagtggagatttcagccgctttgaggtcaatggtagaaaaggaaatatcttcgtataaagactagacagagtgattctcagaaactcctttgtgatgtctgcgttcaactcacagagtttaacctttcttttaatagagcagttaggaaacactctgtttgtaaagtctgcaagtggatattcagacctccttgaggccttcgttggaaacgggatttctacatattatgctagacagaagaattctcagtaacttccttgtgttgtgtgtattcaactcacagagttgaacgatccttcacacagagcagacttgaaacactctttttgtggaatttgcaagtggagatttcagccgctttgaggtcaatggtagaaaaggaaatatcttcgtataaagactagacagaatgattctcagaaactccttagtgatgtgtgcgttcaactcacagagtttaacctttctgttcatagagcagttaggaaacactctgtttgtaaagtatgcaagtggatatacagacctccttgaggccttcgttggaaacgggatttcttcatattctgctagacagaagaattctcagtaacttccttgtgttgtgtgtattcaactcacagagttgaacggttctttacacagagcagatttgagacactctttttgtggaatttgtaagtggagatttcagccgctttgaggtcagtggtagaaaaggaaatatcttcgtataaaaactagacagaatgattctcagaaactctttgtgatgtgtgtgttcaactcacagagtttaacctttcttttcatagagcagttaggaaacgctctgtttgtaaagtctgcaagtggatattcagacctcgttgagaccttcgttggaaacgggatttcttcatattctgctagacagaagaattctcagtaacttctttgtgttgtgtgtattcaactcacagaggtgaacgatcctttacacagagcagacttgaaacactctttttgtggaatttcaagtggagatttcagccgctttgaggtcaatggtagaataggaaatatcttcctatagaaactagacagaatgattctcagaaactcctttgtgatgtgtgcgttcaactcacagagtttaacctttctctccattgagcagttaggaaacactctgtttgtaaagtctgcaagtggatattcagacctcctagaggccttctttggaaacaggctttcttcatattatgctagacagaagaattctcagaaacttctttgtgttgtgtgtattcaactcacagagttgaacgatcctttacacagagcagacttgaaacactctttttgtggaatttgcaagtggagatttcagccgctttgaggtcaatggtagaataggaaatatcttcctatagaaactagacagaatgattctcagaaactcctttgtgatgtgtgcgatcaactcacagagtttaacttttcttttcatagagcagttaggaaacactctgtttgtaaagtctgcaagtggatattcagacctctttgaggccttcgttggaaacgggatttcttcatattatgctagacagaagaattctcagtaacttccttgtgttgtgtgtattcaactgacagagttgaactttcatttacacagagcagatttgaaacactctttttgtggaatttgcaaatggagatttcaagcgctttgaggccaaaggcagaaaaggaaatatcttcgtataaaaactagacagaatcattctcagaaactgctgcatgatgtgtgcgttcaactctcagagtttaacttttcttttcattcagcggtttggaaacactctgtttgtaaagtctgcacgtggaaattttgaccacttagaggccttcgttggaaacgggtttttttcatgtaaggctagacagaagaattcccagtaacttccttgtgttgtgtgcattcaactcacagagttgaacgttcccttagacagagcagatttgaaacactctatttgtgcaatttgcaagtgtagttttcaagctctttaaggtcaacggcagaaaaggaaatatcttggtttcaaaactagacagaatcattcccacaaactgcgttgtgatgtgttcgttcaactcacagtgtttaacctttctgttcatagagcagttaggaaacactctgtttgtaaagtctgcaagtggatattcagacctccttgaggccttcgttggaaacgggatttcttcatattctgctagacagaagaattctaagtaacttccttgtgttgtgtgtattcaactcacagagttgaacgatcctttacacagagcagacttgaaacactctttttgtggaatttgcaagtggagatttcagccgctttgaggtcaatggtagaaaaggaaactatcttcatataaagactagacagaatgattctcataaactcctttgtgatgtgtgcgttcaactctcaaagtttaacttttcttttcatagagcagttaggaaacactctgtttgtaaagtctgcaagtggatattcagacctctttgaggccttctttggaaacgggatttcttcatattatgctagacagaagaattctcagtaacttccctgtgttgtgtgtattcaactgacagagtcgaactttcatttagagagagcagatttgaaacactgtttttgtggaatttgcaagtggagatttcaagcgctttggggccaaaggcagaaaaggaaatatcttcgtataaaaactagacagaatcattctcagaaactgctctgcgatgtgtgcgttcaactctcagagtttaacttttcttttcattcagaagtttggaaacactctgtttgtaaagtctgcacgtggataacttgaacacttagaggccttcgttggaaacgggtttttttcatgtaaggctagacagaagaattctcagtaacttccttgtattgtgtgtattcaactcacagagttgaacgatcctttgcacagagcacacttgtaacactctttttgtggaatttgcaagtggagatttcagccgctttgaagtcaaaggtagaaaaggaaataacttcctataaaaactagacagaatgattctcataaactcctttgtgatgtgtgcgttgaactcacagagtttaacctttcttttcatagagcagttaggaaacactctgtttgtaaagtctgtaagtggatattctgacatcttgtggccttctttggaaacgggatttcttcatattgtgctagacggaagaattctccgtaacttccttgtgttgtgtgtattcaactcacagagttgaacgatcctttacacagagcagacttgtaacactctttttgtggaatttgcaagtggagatttcagccgctttgaagtcaaaggtagaaaaggaaatatcttcctataaaaattagacagaatgattctcagaaactcctttgtgatgtgtgcgttcaactcacacagtttaacttttcttttcatacagcagttaggaaacactctgtttgtaaagtctgcaagtggatattcagacctccttgaggccttctttggaaacgggatttcttcatattatgctagacagaagaatccccagtaacttccttgtgttgtgtgtgttcaactcacagagttgaactttgatttacacagagcagatttgaaacactctttttgtggaatttgcaagtggagatttcaagcgctttggggccaaaggcagaaaaggaaatatcttcgtataaaaactagacagaatcattctcagaaactgctctgcgatgtgtgcgttcaattctgagtttaacttttcttttcattcagcagtttggaaacactctgtttgtaaagtctgcacgtggatattttgaccacttagaggccttcgttggaaacgggtttttttcctgtaaggctatacagaagaattcccagtaacttccttgtgttgtgtacattcaactcacagagttgaacgatcccttagacagagcagatttgaaacactctttttgtgcaattggcaagtggagacttcaagcgctttaaggtcaatggcagaaaaggaaatatcttcgtttcaaaactagacagaatcattcccacaaactgcgttgtgatgtgttcgttcaactcacagagtttaacctttctgttcgtagagcagttaggaaacactctgtttgtaaagtctgtaagtggatattctgacatcttgtggccttcgttggaaacgggatttcttcatattctgctagacagaagaattctcagtaacttccttgtgttgtgtgtattcaactcacagagttgaacgatcctttacagagagcagacttgaaacactctttttgtggaatttgcaagtggagatttcagccgctttgaggtctatggtagaaaaggaaatgtcttcgtataaagactagacagaacgattctcagaaactcctttgtgatgtgtgtgttcaactcacagagtttaacctttcttttcatagagcagttagtaaacactctgtttataaagtctgcaagtggatattcagacccctttgtggccttctttggaaacgggatttcttcatattatgctagacagaagaattctcagtaacttccttgtgttgtgtgtattcaactcacagtagttgaacgaccctttacacagagtagacttgaaacactctttttgttgaatttgcaagtggagatttcagccgctttgaggtcaatggtagaataggaaatatcttcctatagaaactagacagaatgattctcagaaactcctttgtgatgtgtgagttcaactcacagagtttaacctttcttttcatagagtagttaggaaacactctgtttgtaaagtctgcaagtggatattcagacctctttgaggccttcgttggaaacgggattttttcatataaggctagagagaagaattcccagtaacttccttgtgttgtgtgtgttcaactcacagagttgaactttcatttagtcagagcagatttgaaacactctttttgtggaatttgcaaatggagatttcaagcgctttgaggccaaaggcagaaaaggaaatatcttcgtataaaaactagacagaataattctcagaaactgttctgcgatgtgtgcgttcaactctcagagtttaacttttcttttcattcagcagtttggaaacactctgtaaactctgcatgtggatattttgaccacttagaggccttcgtcggaaacgggtttttttcctgtaaggctagacagaagaattcccagtaacttccttgtgttgtgtacattcaactcacagagttgaacgttcccttagacagagcagatttgaaacaatctttttgtgcaattggcaagtggtgatttcagccgctttgaggtcaatggtagaaaaggaaatatcttcgtataaaaactagacagaatcattcccacaaaactgcgttgtgatgtgttcgttcaattcacagagtttaacctttctgttcatagagcagttaggaaacactctgtttgtaaagtctgtaagtggatattctgacatcttgtggccttcgttggaaacgggatttcttcgtattctgctagacagaaagaattctcagtaacttccttgtgttgtgtgtattcaactcacagagttgaacgatcctttacacagagcagacttgaatcactctttttgtggaatttgcaagtggagatttcagccgctttgaggtcaatagtagaaaaggaaatatcttcgtagaaaaactagacagatgattctcagaaactcctttgtgatgtgtgcgttcaactcacagagtttaaactttcttttcatagagcagttaggaaacactctgtttgtaaagtctgcaagtggatattcagacctctttgaggccttcgttggaaacgggatttcttcatattctgctagacagaagaattcccagtaacttccttgtgttgtgtgtgttcaactcacagagttgaactttcatttacaaagagcagatttgaaacactctttttgtggaatttgcaagtggagatttcaagcgctttgaggccaaaggcagaaaaggaaatatcttcgtataaaaactagacagaatcattctcagaaactgctgcgtgatgtgtgcgttcaactctcaggagtttagcttttcttttcattcagcggtttggaaacactctgtttgtaacgtctgcacgtggatattttgaccacttagaggccttcgttggaaacgggttttttgcatgtaaggctagacagaagaattcccagtaacttccttgtgttgtgtgcattcaactcacagagttgaacgttcccttagacagagcagatttgaaacactctatttgtgcaatttgcaagtgtagatttcaagcgctttaaggtcaatggcagaaaaggaaatttcttcgttgcaaaactagacagaatcattcccacaaactgcgttgtgatgtgttcgttcatctcacagagtttaacctttcttttcgtagagcagttaggaaacagtctgtttgtaaattctgtaagtggatattctgacatacttgtggccttcgttggaaacgggatttcttcatattctgctagacagaagaattctcagaatcttccttgtgttgtgtgtattcaactcacagagttgaacgatcctttacacagagcagacttgaaacactctttttgtggaatttgcaagtggagatttcagccgctttgaggtccatggtagaaaaggaaatctcttcgtataaaaactagacagaatgattctcagaaaatcctgtgtgatgtgtgcgttcatctcacagagtttaacctttcttttcatagagcagttaggaaacactctgtttgtaaagtctgcaagtggatattcagacctccttgaggccttccttggaaacgggatttcttcatattctgctagacagaagaattctcagtaacttccttgtgttgtgtgtattcaactgacagagttggactatcattttgagagagcagatttgaaacactgtttttgtggaatttgcaagtggagatttcaagcgctttggggccaaaggcagaaaaggaaatatcttcgtataaaaactagacagaatcattctcagaaactgctctgcgatgtgtgcgttcaactctcagagtttaacttttcttttcattcagcagtttgaaaacactctgtttgtaaagtctgcacgtggataatttgaccacatagaggccttcgttggaaacgggtttttttcatgtaaggctagacagaagaattcccagtaacttccttgtgttgtgtgcattcaactcacagagttgaacgttcccttagacagagcagatttgaaacactctatttgcgcaacttgcaagtgtagatttcaagcgctttaaggtcaatggcagaaaaggaaatatcttcgtttcaaaactagacagaatcattccctcaaactgcgttgtgatgtgttcgttcaactcacagagtttaacctttcttttcatagagcagttaggaaacagtctgtttgtaaattctgtaagtggatattctgacatcttgtggccttcgttggaaacgggatttcttcatattctgctagacagaagaattctcagaatcttccttgtgttgtgtgtattcaactcacagagttgaacgatcctttacacagagcagacatgaaacactctttttgtggaatttgcaagtggagatttcagccgctttgaggtccatggtagaaaaggaaatatcttcgaataaaaactagacagaatgattctcagaaactcctttgtgatgtgggcgttcaactcacagagtttaaccttccttttcatagagcagttaggaaacactctgtttgtaaagtctgcacgtggatatttggacttctttgaggccttcgttggaaacgggtttttttcatgtaaggctagacggaagaattctcagtaacttccttgtgttgtgtgtattcaactgacagagttgaactttcatttggagagagcagatttgaaacactatttttgtggtatttgcaagtggagatttcaagcgctttggggccaaaggcagaaaaggaaatatcctcgtataaaaacaagacagaatcattctcagaaactgctctgcgatgtgtgcgttcaactctcagagtttaacttttcttttcattcagcagtttggaaacactctgtttgtaaagtctgcacgtggataatttggccacttagaggccttcgttggaaacgggttttttcatgtaaggctagacagaagaattcccagtaacttccttgcgttgtgtacattcaactcacagagttgaacgttcccttagacagagcagatttgaaacactctttttgtgcaattggcaagtggagatttcaagcgctttaaggtcaatggcagaaaaggaaatatcttcgtttcaaaactagacagaatcattcccacaaactgcgttgtgatgtgttcgttcaaatcacagagtttaacctttcttttcatagagcagttaggaaacagtctgtttgtaaattctgtaagtggatattctgacatcttgtggccttcgttggaaacgggatttcttcatattctgctagacagaagaattctcagtaacttccttgtgttgtgtgtattcaactcacagagttgaacgatcctttacagagagcaggcttgaaacactctttttgtggaatttgcaagtggagatttcagccgctttgaggtcaatggtagaatgggaaatatcttcctatagaaactagacagaatgattctcagaaactcctttgtgatgtgtgtgttcaactcacagagtttaaccttttttttcatagagcagttaggaaacactctgtttgtaaagtctgcaagaggatattcagacctctttgaggccttcgttggaaacgggtttttttcatataaggctagacagaagaattcacagtaacttccttgtgttgtgtgtattcaactgacagagttgaactttcatttagagagagcagatttgaaacactgtttttgtggaatttgcaagtggagatttcaagcgctttggggccaaaggcagaaaaggaaatatcttcgtataaaaactagacagaatcattctcagaaactgctgcgtgatgtgtgcgttcaactctcagagtttaacttttcttttcattcagcggtttggaaacactctgtttgtaaagtctgcacgtggatattttgaccacttagaggccttcgttggaaacgggttttttttcatgtaaggctagacagaagaattcccagtaacttcccttgtgttgtgtacattcaactcacagagttgaacgttccgttagacagagcagatttgaaacactctttttgtgcaattggcaaatggagatttcaagcgctttaaggtcaatggcagaaaaggaaatatcttcgtttcaaaactagacagaaatcattcccacaaactgcgttgtgatgtgttcgttcaactcacagcagtttaacctttcttttcatagagcagttaggaaacagtctgtttgtcaattctgtaagtggatattctgacatcttgtggccttcgttggaaacgggatttcttcatattctgctagacagaagaattctcagtaacttccttgtgttgtgtgtattcaactcacagagttgaacgatcctttacacagagcagacttgaaacactctttttgtggaatttgcaagagtagatttcaagcgctttaaggtcaatggcagaaaaggaaatatcttcgtttcaaaactagacagaatgattctcagaaactcctttgtgatgtgtgcgttcaacacacagagtttaacttttcttttcatagagcagttaggaaacactctgtttgtaaagtctgcaagtggatattcagacctctttgaggccttcgttggaaacgggatttcttcatattctgctagacagaagaattctcagtaacttccttgtgttgtgtgtattcaactcacagagttgaacgatcctttacacagagcagacttgaaacactctttttgtggaatttgcaagtggatatttcagccgctttgaggtcaatagtagaaaaggaaatatcttcgtagaaaaactagacagaatcattctcagaaactgctgcgtgatgtgtgcgttcaactctcagagtttaacttttcttttcattcagcggtttggaaacactctgcttgtaaagtctgcacgtggatattttgaccacttagaggccttcgttggaaacgggtttttttcatgtaaggctagacagaagaattcccagtaacttccttgtgttgtgtgcattcaactcacagagttgaacgttcccttagacagagcagatttgaaacactctatttgtccaatttgcaagtgtagatttcaagcgctttaaggtcaacggcagaaaaggaaatatcttcgtttcaaaactagacagaatgattctcagaaaatcttttgtgatgtgtgcgttcaactcacagagattaacttttcttctcatagagcagttaggaaacactctgtttgtaaagtttgcaagtggatattcagacctctttgaggccttcgttggaaacgggatttcttcatattatgctagacagaagaattctcagtaacttccttgtgttgtgtgtattcaactcacagagttgaacgatcctttacagagagcagacttgaaacacactttttgtggaatttgcaagtggagttttcagccgctttgaggtcaattgtagaaaaggaaatatcttcgtataaagactagacagaatgattctcataagctcctttgtgatgtgtgcgttcaactcacagagtttaacctttcttttcatagagcagttaggaaacactctgtttgtaaagtctgcaagtggatattcagacctccttgaggccttcgttggaaacgggatttcttcatattctgctagacagaagaattctcagaaacttccttgtgttgtgtgttttcaactcacagagttgaacgatgctttacacagagtagacttgaaacactctttttgtgaaatttgcaagtagagatttcagccgctttgaggtcaacggtagaaaaggaaatatcttcctataaaaactagacagaatgattctcagaaactcctttgtgatgtgtgtgttcaactcacagagtttaacgtttcttttcatagagcagttagtaaacactctgtttataaagtctgcaagtggatattcagacccctttgaggccttcgttggaaacgggatttcttcatattatgctagacagaagaattctcagtaacttccttgtgttgtgtgtattcaactcacagagttgaactttcatttacacagagcagatttgaaacactctttttgtggaatttgcaaatggagatttcaagcgctttgaggccaaaggcagaaaaggaaatatcttcgtttcaaaactagacagaatcattctcagaaactgctgcgtgatgtgtgcgttcaactctgagagtttaacttttcttttcattcagcggtttggaaacactctgtttgtaaagtctgcacgtggatattcagacctctttgaggccttcgttggaaacgggtttttttcatgtaaggctagacagaagaattcccagtaacttccttgtgttgtgtacattcaactcacagagttgaacgttcccttatacagagcagatttgaaacactctttttgtgcaattggcaagtggagatttcaagcgctttaaggtcaatggcagaaaaggaaatatcttcgtttcaaaactagacagaatcattcccacaaagtgcgttgtgatgtgttcgttcaactcacagagtttaacctttctgttcatagagcagttaggaaacactctgtttgtaaagtctgtaagtggatattctgacatcttgtggccttcgttggaaacgggatttcttcatattctgctagacagaagaattctcagtaacttccttgtggtgtgtgtattcaactcacagagttgaacgatcctttacacagagcagacttgagacactcattttgtggaatttgcaagtggagatttcagccgctttgaggtcaatggtagaaaaggaaactatcttcatataaagactagacagaatgattctcacaaactcctttgtgatgtgggcgttgaactcacagagtttaacctttcttttcatagagcagttaggaaacactctgttggtaaagtctgaacgtggatatttggacttctttgtggtcttcgttggaaacgggtttttttcatgtaaggctagacagaagaattctcagtaacttccttgtgttgtgtgtattaaactgacagagttgaactttcatttagagagagcagatttgtaacactgtttttgtggaatttgcaagtggagatttcaagcgctttggggccaaaggcagaaaaggaattatcttggtataaaaactagacagaatcattctcagtaactgctctgtgatgtgtgcgttcaactctcagagtttaacttttcttttcattcagcagtttggaaacactctgtttgtaaagtctgcacgtggatattttgaccacttagaggccttctttggaaacggttttttctcatgtaaggctagacagaagaattcccaggaacttacttgtgttgtgtacattcaactcacagagttgaacgttcccttagacagagcagatttgaaacactctttttgtgcaattggcaaatggagatttcaagcgctttaaggtcaatggcagaaaaggaaatatcttcgtttcaaaactagacagaatcattcccacaaactgcgttgtgatgtgtgcgttcaactcacagagtttaacctttctgttcatagagcagttaggaaacactctgtttgtaaagtctgtaagtggatattctgacatcttgtggccttcgttggaaacgggatttcttcatattctgctagacagaataattctcagtaacttccttgtgttgtgtgtattcaactcaaagagttgaaggatcctttacagagagcaggcttgaaacactctttttgtcgaatttgcaagtggagatttcagctgctttgaggtcaatggtagaataggaaatatcttcttatagaaactagacagaatgattctcagaaactcctttgtgatgtgtgcgttcaactcacagagttcaacctttcttttcatagagcagttaggaaacactctgtttgtaaagtctgcaagtggatattcagacctccttgaggccttcgttggaaacgtgatttcttcatattatgctagacagaagaattctcagtaacttcccttgtgttgcgtgtattcaactcacagagttgaacgatcctttacaaagagcagacttgaaacactctttttggggaatttgcaagtggagatttcagccgctttgaggtcaatggtagaatagggaatatcttcctatagaaactagacagaatgattctcagaaactcctttgtgatgtgtgcgttcaactctcagagtttaacttttcttttcattcagcagtttggaaacactctgtttgtaaagtctgcacgtggataatttgaccacttagaggctttcgttggaaacgggtttttttcctgtaaggctagacaaaagatttcccagtaacttccttgtgttgtgtgcattcaactcacagagttgaacgttccgttagacagagcagatttgaaacactctatttgtgcaatttgcaagtgtagatttcaagcgctttaaggtcaatggcagaaaaggaaatatcttcgtttcaaaaccagacagaatcattcccacaaactgcgttgtgatgtgttcgttcaactcacagagtttaacctttctgttcatagagcagttaggaaacactctgtttgtaaagtctgcaagtggatattcagacctccttgaggccttcgttggaaatgggatttcttaatattctgctagacagaagaattctcagaatcttccttgtgttgtgtgtattcaactcacagagttgaacgatcctttacacagagcagacttgaaacactctttttgtggaatttgcaagtggagatttcagcctctttgaggtccatggtagaaaaggaaatatcttcgtataaaaactagacagaatgattctcagaaaatcttttgtgatgtgtgcgttgaactcacagagtttaacttttcttctcatagagcagttaggaaacactctgtttgtacagtctgcaagtggatattcagacctctttgaggccttcgttggaaacgggatttcttcatattatgctagacagaagaattcccagtaacttcccttgtgttgtgtgtgttcaactcacagagttgaactttcatttacccagagcagatttgaaacactctttttgtggaatttgcaagtggagatttcaagcgctttgaggccaaagacagaaaaggaaatatcttcgtttcaaaactagacagaatcattctcagaaactgctgcgtgatgtgtgcgttcaactctcagagtttaacttttcttttcattcagcagtttggaaacactctgtttgtaaagtctgcacgtggaaattttgaccacttagaggccttctttggaaacgggattttttcatgtaaggctagacagaagaattcccagtaacttccttgtgttgtgtgcattcaactcacagagttgaacgttcccttagacagagcagatttgaaacactctatttgtgcaatttgcaagtgtagttttcaagctctttaaggtcaacggcagaaaaggaaatatcttcgtttcaaaactagacagaatcattcccacaaactgcgttgtgatgtgttcgtccaactcacagagtttaacctttctgttcatagagcagttaggaaacactttgtttgtaaagtctgtaagtggatattctgacatcttgtggccttcgttggaaacgggatttcttcatattctgctagacagaagaattctcagtaacttccttttgctgtgtgtattcaactcacatagttgaatgatcctttacacagagcagattagaaacacactttttgtggattttgcaagtggagatttcagccgctttgaggtcaatggtagaaaaggatatatcttcgtatagaaactagacagaatgattctcagaaactactttgtgatgtgtgcgttcaactcacagagtttaacctttcttttcctagagtagttaggaaacactctgtttttaaagtctgcaagtggatattcagacctctttgaggccttcgttggaaacgggatttcttcatattatgctagacagaagaattcccagtaacttccttgtgttgtgtgtgttcaactcacagagttgaactttcatttacacagagcagatttgaaacactctttttgtggaatttgcaagtggagatttcaagcgctttgaggccaaaggcagaaaaggaaatatcttcgttcaaaactagacagaatcattctcagaaactgctctgcgatgtgtgcgttcaactctcagagtttaacttttcttttcatgcagcagtttggaaacactctgtttgtaaagtctgcacgtggataacttgaccacttagaggacttcgttggaaacgggtttttttcctgtaaggctagacagaagaattcccagtaacttccttgtgttgtgtacattcaaatcacagagttgaacgttcccttagacagagcagacttgtaacactctttttgtggaatttgcaagtggagatttcagccgctttgaagtcaaaggtagaaaaggaaatatcttcctataaaaactagacagaatgattctcagaaactcctttgtgatgtgtgtgttcaactcacagagtttaacatttcttttcatagagcagttaggaaacactctgtttgtaaagtctgcaagtggatattcagacctagttgaggccttcgttggaaacgggatttcttcatattctgctagacagaagaattctgagtaacttccttgtgttgtgtttattcaactcacagagttgaatgatcctttacacagagcagacttgaaacactctttttgtggaatttgcatgtggagatttcagccgctttgtggtcaatggtagaaaaggaaatatcttcgtataaagactagacagaatgattctcagaaactcctttgtgatatgtgcgttcaactcacagagtttaacctttcttttcatagagcagttaggaaacactctgcttgtaaagtctgcaagtggatattcagccctctttgaggccttcgttggaaatgggtttttttcatataaggctagacagaggaattcccagtaacttccttgtgttgtgtgtgttcaactcacagagttgaactttcatttacacagagcagatttgaaacactctttttgtggaatttgcaagtggagatttcaagcgctttgaggccaaaggaagaaaaggaaatatcttcgtttcaaaactagacagaatcattctcagaaactgctgcgtgatgtgtgcgttcaactctcagagtttaacttttcttttcattcagcggtttggaaacactctgtttgtaaagtctgcacgtggatattttgaccacttagaggccttcgttggaaacgggttttttttcatgtaaggctagacagaagaattcccagtaacttccttgtgttgtgtgcattcagctcagagagttgaaccttcccttagacagagcagatttgaaacactctatttgtgcaatttgcaagtgtagatttcaagcgcttcaaggtcaatggcagaaaaggaaatatcttcgtttcaaaactagacagaatcattcccacaaactgcgttatgatgtgttcgttcaactcacagagtttaacctttcttttcatagagcagttaggaaacagtctgtttgtaaattctgtaagtggatattctgacatcttgtggccttcgttggaaacgggatttcttcatattctgctagacagaagaattctcagtaactaccttgtgttgtgtgtattcaactcacagagttgaacgatcctttacacagagcggacttgaaacactcgttttgtggaatttgcaagtggagatttcagccgcgttgaggtcaatggtagaaaaggaaatatctacgtataaaaactagacagaatgattctcagaaactcctttgtgatgtgtgcgttcaactcacagagtataacctttcttttcatagagcagttaggaaacactctgtttgtaaagtctgcaagtggatattcagacctctttgaggccttcgttggaaacgggtttttttcatataaggctagacagaagaattcccagtaacttcccttgtgttgtgtgtgttcaactcacagagttgaactttcatttacacagagcagatttgaaacactctttttgtggaatttgcaggtggagatttcaagcgctttgaggccaaaggcagaaaaggaaatatcttcgtataaaacctagacagaatcattctcagaaactgctgcgtggtgtgtgcgttcaactctcagagtttaacttttcttttcattcagcggtttggaaacactctgtttgtaaagtctacacgtggatattttgaccacttagaggccttcgttggaaactggttttcttcatgtaaggctagacagaagaattcccaggaacttccttgtgttgtgtacattcaactcacagagttgaacgttcccttagacagagcagatttgaagcactctttttgtgcaattggcaagtggtgatttcagccgctttgaggtcaatggtagaaaaggaaatatcttcgtataaaaactagacagaatgattctcagaaactcctttgtgatgtgtgcgttcaactcacagagtttaacctttcttttcatagagcagttaggaaacactgtttgtaaagtctgcaagtggatattcagacatccttgaggccttcattggaaacgggatttcttcatattatgctagacagaagaattctcagtaacttccttgtgttgtgtgtattcaactcacagagttgaacgatcctttacacagagcagacttgaaacactctttttgtggaatttgcaagtggagatttcagccgctttgaggtcaatggtagaataggaaatatcttcctatagaaactggacagaacgattctcagaaactcctttgtgatgtgtgcgtacaactcacagagtttaacctttcttttcatagagcagttaggaaacactctgtttgtaaagtctgcaagtggatattcagacctctttgaggccttcgttggaaacgggatttcttcatattcctgctagacagaagaattcccagtaacttccttgtgttgtgtgtgttcaactcacagtgttgaactttcatttacacagagcagattggaaacactctttttctggaatttgcaagtggagatttcaagcgctttgaggccaaaggcagaaaaggaaatatcttcgtataaaaactagacagaatcattctcagaaactgctgcgtgatgtgtgcgttcaactctcagagtttaacttttcttttcattcagcgctttggaaacactctgtttgtaaagtctgcacgtggaaattttgaccacttagaggccttcggttggaaacgggtttttttcatgtaaggctagacagaagaattctcagtaacttccttgtgttgtgtgtattcaactcacagagttgaacgatcctttacacagagcagattgaaacactctttttgtggaatttgcaagtggagatttcagccgctttgaggtcaatggtagaaaaggaaatatcttcgtataaagactagacagaatgattctcagaaactcctttgtgatgtgtgcgttcaactcacagagtttaacctttctgttcatagagcagttaggaaacactctgtttgtaaagtctgtaagtggatattctgacatcttgtggtcttcgttggaaacgggatttctgcatattctgctagacagaataattctcagtaacttccttgtgttgtgtgtattcaactcacagagttgaacgatcctttacagagagcagacttgaaacactctttttgtggaattcgcaagtggagatttcagccgctttgaggtcaatgttagaaaaggatatatcttcgtataaagactagacagaatgattctcagaaactcctttgtgatgtgtgcgttcaactcacagagtttaacctttcttttcatagagcagttaggaaaccctctgtttataaagtctgcaagtggatattcagacctctttgaggccttcgttggaaacgggatttcttcatattatgctagacagatgaattctcattaacttccttgtgttgtgtgtattcaactcacagagttgaacgatcctttacacagagcggacttgaaacactctttttgtggaatttgcaagtggagatttcagccgcgttgaggtcaatggtagaaaaggaaatctcttcgtataaaaactagacagaatgattctcagaaactcctttgtgatgtgtgtgttcaactcacagagtttaaccttagttttcatagagcagttaggaatcactctgtttgtaaagtctgcaagtggatattcagacctctttgaggccttcgttggaaacgggtttttttcatataaggctagacagaagaattctcagtaacttccttatgttgtgtgtattcaactgacagagttgaactttcgtttagagagagcagatttgaaacactctttttgtggaatttgcaagtggagatttcaagcgctttggggccaaaggcagaaaaggaaatatcttcgtataaaaactagacagaatcattatcagaaactgctgcgtgatgtgtgtgttcaactctcagagtttaacttttcttttcattcagcggtttagaaacactctgtttgtaaagtctgcacgtggatattttgtccacttagaggccttcgttggaaacgggttttttgcatgtaaggctagacagaagaattccccagtaacttccttgtgttgtgtacattcaactcacagagttgaacgttcccttacacagagcagatttgaaacactctttttgtgcaattggcaagtggagatttcaagcgctttaaggtcaatggcagaaaaggaaatatcttcgtttcaaaactagacagaatcattcccagaaactgcgttgtgatgtgttcggtaaactcacagagtttaaccattcttttcatagagcagttaggaaacagtctgtttgtaaattctgtaagtggatattctgacatcttgtggccttcgttggaaacgggatttcttcatattctgctagacagaagaattctcagtaacttccttgtgttgtgtgtattcaactcacagagttgaaccatctttcacacagagcagatctgaaacactctttttgtggaatttgcaagtggagatttcagccaccttgaggtcaatggtagaaaaggaaatatcttcgtataaaaactagacagaatgattctcagaaactcctttgtgatgtgtgcgttcaactcacagagttcaacctttcttttcatagagcagttaggaaacactctgtttgtaaagtctgcaagtggatattcagacctccttgaggccttcgttggaaacgggatttcttcatattatgcaagacagaagaattctcagtaacttccttgtgttgtgtgtattcaactcacagagttgaaagatcctttacagagagcagacttcaaacactctttttgtggaatttgcaagtggagatttcaggcgctttgaggtcaatggtagaaaaggaaactatcttcgtataaagactagacagaatgattctcagaaactcctttgtgatgtgtgcgttcaactcacagagtttaacttttcttttcatagagcagttaggaaacactctgtttgtaaagtctgcaagtggatattcagacatctttgaggctttcgttggaaacgggatttcttcatattctgctaggcagaagaattctcagtaacttccttgtgttgtgtgtattcaactcacagagttgaacgattctttacacagagcagacttgaaacactctttttgtggaatttgcaagtggagatttcagccgctttcatgtcactggtagaaaaggaaatatcttcgtataaagactagacagaatgattctcagaaactcctttgtgatgtgtgcgttcaactcacagagttcaacctttcttttcatagagcagttgggaaacactctgtttgtaaagtctgcaagtggatattcagacttctttgaggccttctttggaagcgggatttcttcatgttctgctagacagaagaattctcagtaacttccttgtgttgtgtgtattcaactcacagagttgaatgatcctttacacagaacagacttgaaacactcttgttgtggaatttgcaagtggagatttcagccgctttgtggtcaacggtagaataggtaatatcttcctatagaaactagacagaatcattctcagaaactgctctgcgatgtgtgcgttcaactctcacagtttaacttttcttttcattcagcagtttggaaacactctgtttgtaaagtctgcacgtggataatttgaccacttagaggccttcgttggaaacgggttattttcatgtaaggctagacagaagaattcccagtaacttccttgtgttgtgtgcattcaactcacagagttgaacgttcccttagacagagcagatttgaaacactctatttgtgcaatttgcaattgtagatttcaagcgctttaaggtcaatggcagaaaaggaaatatcttcgtttcaaaactagacagaatcattcccacaaactgcgttgtgatgtgttcgttcaactcacagagtttaacctttctgttcatagagcagttaggaaacactctatttctaaagtctgtaagtggatattctgacatcttgtggccttcgttggaaactgggatttcttcatattctgctagacagaagaattcccagtaacttccttgtgttgtgtgcattcaactcacagagttgaacgatcctttacacagagcagacttgaaacactctttttgtggaatttgcaagtggacatttcagccgctttgaggtcaatagtagaaaaggaaatatcttcgaagaaaaactagacagaatgattctcagaaactcctttgtgatgtgtgcgttcaactcacactgtttaacctttcttttcatagagcagttaggaaacactctgtttgtaaagtctgcaagtggatattcagacctccttgaggcattcgttggaaacgggatttcttcatattatgctagacagaagaattcccagtaacttccttgtgttgtgtgtgttcaactcacagagttgaactttcatttacacagagcacatttgaaacactctttttgtggaatttgcaaatggagatttcaagcgctttgaggccaaaggcagaaaaggaaatatcttcgtttcaaaactagacagaatcattctcagaaactgctgcgtgatgtgtgcgttcaactctcagagtttaacttttcttttcattcagccgtttggaaacactctgtttataaagtctgcacgtggaaattttgaccacttagaggccttcgttggaaacgggtttttttcatgtaaggctagacagaagaattcccagtaaattccttgtgttgtgtacattcaactcacagagttgaacgttcccttagacagagcagatttgaaacactctttttgtgcaattggcaagtggagatttcaagcgctttaaggtcaatggcagaaaaggaaatatcttcgtttcaaaactagacagaatcattcccacaaactgcgttgtgatgtgttcgttcatctcacagagtttaacctttcttttcatagtgcagttaggaaacactctgtttgtaaattctgtaagtggatattctgacatcttgtggccttcgttggaaacgggatttcttcatattctgctagacagaagaattctcagaatcttccttgtgttgtgtgtcttcaactcacagagttgaacgatggtttacacagagcagatttgaaacactctttttgtggaatttgcaagtggagatttcagccgctttgaggtcaatggtagaaaaggaaatgtcttcgtataaaaactagacagaatgattctcagaaactcctttgtgatgtgtgcgttcaactcacagagtttaacctttcttttcatagagcagttaggaaacactctgtttgtaaagtctgcaagtggatattcagacctctttgaggccttcgttggaaacgggtttttacatataaggcttgacagaacaattcccagtaacttccttgtgttgtgtgtgttcaactcacagagttaaactttcatttacacagagcagatttgaaacactctttttgtggaatttgcaagtggagatttcaagcgctttgaggccaaaggcagaaaaggaaatatcttcgtataaaaactagacaaaatgattctcagaaactcctttgtgatgtgtgcgttcaactcgcatagtttaacctttcttttcatagagcagttaggaaacactcggtttgtaatgtctgcacgtggatatttggacttctttgaggccttctttggaaacgggttttttccatgtaaggctagacagaagaattcccagtaacttcattgtgttgtgtgcattcaactcacagagttgaacgttcccttagagcagatttgaaacactctatttgtgcaatttgcaagtgtagatttcaagcgctttaaggtcaatggcagaaaaggaaatatcttcgtttcaaaactagacagaatcattcccacaaactgcgttgtgatgcgttcgttcaactcacagagtttaacctttctgttcatagagcagttaggaaacactctgtttgtaaattctgcaagtggatattcagacctccttgaggccttcgttggaaacgggatttcttcatattctgctagacagaagaattctcagtaacttcccttgtgttgtgtgtattcaactcacagagttgaacgatcctttacacagagcagacttgaaacactctttttgtggaatttgcaggtggagatttcagccgctttgtgttcaatggtagaataggaaatatcttcctatagaaactagacagaatgattctcagaaactcctttgagatgtgtgtgttcaactcacagagtttaaccttgcttttcatagagcagttaggaatcactctgtttgtaaagtctgcaagtggatattcagacctctttgaggccttcgctggaaacgggtttttttcatataaggctagacagaagaattctcagaatcttccttgtgttgtgtgtattcaactcacagagttgaacgatcctttacacagagcagatttgaaacactctttttgtggaatttgcaaatggagatttcaagcgctttgaggccaaaggcagaaaaggaaatatcttcgtataaaaactagacagaatcattctcagaaactgctctgcgatgtgtgcatgcaactctaagagtttaacttttcttttcattcagcagtttggaaacactctgtttgtaaagtctgcacgtggataatttgaccacttagaggccttcgttggaaacgggtttttttcatgtaaggctagacagaagaattcccagtaacttccttgtgttgtgtacattcaactcacagagttgaacgttcccttagacagagcagacttgtaacactctttttgtggaatttgcaagtggagatttcagccgctttgaaatcaaaggtagaaaaggaaatatcttcctataaaaactagacagaatgattctcagaaactcctttttgatgtgtgcgttcaactcacagagtttaacctttcttttcatagagcagttaggaaacactctgtttgtaaagtctgcaagtggatattcagacctctttgaggccttcgttggaaacgggatttcttcatattctgctagacagaagaattctcagtaacttccttgtgttgtgtgtattcaactcacagagttgaaagatcctttacacagagcattcttgaaacactctttttgtggaatttgcaagtggagatttcagacgctttgaggtcaatagtagaaaaggaaatatcttcgtagaaaaactagacagaatgattctcagaaactcctttgtgatgtgtgcgttcaactcacagagtttaaacctttcttttcatagagcagttaggaaacactctgtttgtaaagtctgcaagtggatattcagacctccttgagaccttcgttggaaacgggtttttttcatataaggctagacagaagaattctcagtaacttccttgtgttgtgtgtattcaactgacagcagttgaactttcatttagagagaggagatttgaaacactgtttttgtggaatttgcaagtggagatttcaaacgctttggggccaaaggcagaaaaggaaatatattcgtataaaaactagacagaatcattctcagaaactgctgcgtgatgtgtgcgttcgactctcagagtttaacttttcttttcattcagcggtttggaaacactctgtttgtatagtctgcacgtggatattttgaccacttagaggccttctttggaaacgggtttttttcatgtaaggctagacagaagaattcccaggaacttccttatgttgtgtacattcaactgagagagttgaacgttcccttagacagagcagatttgaaacactctttttgtgcaattggcaagtggtgatttcagccggtttgaggtcaatggtagaaaaggaaatatcttcgtataaaaactagacagaatcattaccacaaactgcgttgtgatgtgttcgttcaactcacagaatttaacctttctgttcatagagcagttaggaaacactctgtttgtaaagtctgtaagtggatattctgacatcttgtggccttcgttggaaacgggatttcttcatattctgctggacagaagaattctcagaatcttccttgtgttgtgtgtattcaactcacagagttgaacgatggtttacacagtagcagatttgaaacactcttttggtggaatttgcaagtggagatttcagccgctttgaggtcaatggtagaaaaggaaatatcttcgtataaaaactagacagaatgattctcagaaactgctttgtgatgtgtgcgttcaactcacagagtttaacctttcttttcatagagcagttaggaaacactctgtttgtaaagtctgcaagtggatattcagacctctttgaggccttcgttggaaacgggtttttttcatgtaaggctagacagaagaattctcagtaacttccttgtgttgtgtgtattcaactgacagagttgaactttcatttagagagagcagatttgaaacactgtttttgtggaatttgcaattggagatttcaagcgctttggggccaaaggcagaaaaggaaatatcttcgtataaaaactacacagaatcattctcagaaactgctctgcgatgtgtgcgttcaactctcagagtttaacttttcttttcattcagcagtttggaaacactctgtttgtaaagtctgcacgtggatattttgaccatttagaggccttcgttggaaacgggtttttttcctgtaaggctagagagaagaattcccagtaacttccttgtgttgtgtgcattcaactcacagagttgaacgttcccttagacagagcagatttgaaacactctatttgtgcaatttgcaagtgtagatttcaagcgctttaaggtcaatggcagaaaaggaaatatcttcgtttcaaaattagacagaatcattcccacaaactgcgttgtgatgtgttcgttcaactcacagactttaacctttctgttcatagagcagttaggaaacactctgtttgtaaagtctgcaagtggatattcagacctccttgaggccttcgttggaaacgggatttcttcatattctgctagacagaaagaattctcagtaacttccttgtgttgtgtgtattcaactcacagagttgaacgatcctttacacagagcagacttgaaacactctttttgtggaatttgcaagtggagatttcagccgctttgaggtcaaaggtagaaaaggaaactatcttcatataaagactagacagatgattctcagaaactcctttgtgatgtgtgcgttcaacccacagagttcaacctttcttttcatagagcagttgggaaacactctgtttgtaaagtctgcaagtggatattcagacttctttgaggccttcgttggaagcgggatttcttcatattctgctagacagaagaattcccagtaacttccttgtgttgtgtgtattcaactcacagagttgaactttcatttacacaggagcagatttgaaacactctttttgtggaatttgcaaatggagatttcaagccctttcaggccaaaggcagaaaaggaaatatcttcgtataaaaactagacagaatcattctcagaaactgctgcgtgatgtgtgcgatcaactctcagagtttaacttttcttttcattcagcggtttggaaacactctgtttgtaaagtctgcacgtggatattttgaccacttagaggccttcgttggaaacgggttttcttcatgtaaggctagacagaagaattcccagtaacttccttgtgttgtgtacattcaactcacagagttgaacgttcccttagacagagcagatttgaaacactctttttgtgcaattggcaaatggagatttcaagcgctttaaggtcaatggcagaaaaggaaatattcttcgtttcaaaactagacagaatcattcccacaaactgcgttgtgatgtgttcgttcaactcacagaagtttaacctttctgttcatagagcagttaggaaacactctgtttgtaaagtctgcaagtggatattcagacctccttgaggccttcgttggaaacgggatttcttcatattctgctagacagaagaattctcagaatcttccttctgttgtgtgtattcaactcacagagttgaacgttcctttacacagagcagacttgaaacactctttttgtggaatttgcaagtggagatttcagccgctttgaggtcccatggtagaaaaggaaatatcttcgtataaaaactagacagatagattctcagaaactcctttgtgatgtgtgcgttcaactcacagagtttaacctttcttttcatagagcagttaggaaacactctgtttgtaaagtctgcaagtggatattcagacctctttgaggccttcgttggaaacgggtttttttcatataaggctagacagaagaattctcagtaacttccttgtgttgtgtgtattcaactgacagagttgaactttcatttagagagagcagatttgaaacagtgtttttgtggaatttgcaagtggagatttcaagcgctttggggccaaaggcagaaaaggaaatatcttcgtataaaaactagacagaatcattctcagaaactgctgcgtgatgtgtgcgttcaactcacagagtttaagttttcttttcattcagcggtttggaaacactctgtttgtaaagtctgcacgtggatattttgaccacttagaggccttcgttggaaacgggattttttcatgtaaggctagacagaagaattcccagtaacttccttgtgttgtgtatattcaactcacagagttgaacgttcccttagacagagcagatttgaaacactctttttgtgcaattggcaagtggagatttcaagcgctttaaggtcaatggccgaaaaggaaatatcttcgtttcaaaactagacagaatcattcccacaaactgcgttgtgatgtgttcgttcaactcacagagtttaacgtttattttcatagagccgttaggaaacactctgtttgtaaactctgcaagtggatattcagacctctttgaggccttcgttggaaacgggatttcttcatattctgctagacagaagaattctcagtaacttccttgtgttgtgtgtattcaactcacagagttgaacgatcctttacacagagcagacttgaaacactctttttgtggaatttgcaagtggagatttcagccgctttgaggtcaatagtagaaaacgaaatatcttcgtagaaaaactagacaaaatgattctcagaaacttctttgtgatgtgtgcgttcaactcacagagtttaacctttcttttcatagagcagttaggaaacactctgtttgtaaagtctgcaagtggatattcagacctctttgaggccttctttggaaacgggtttttttcatataaggctagacagaataattctcagaatcttccttgtgttgtgtgtattcaactgacagagttgaactttcatttagagagagcagatttgaaacactgtttttgtggaatttgcaagtggagatttcaagcgctttggggccaaaggcagaaaaggaaatatcttcgtataaaaactagacagaatgattctcagaaactcctttgtgatgtgtctgttcaactcacagagtttaacttttcttttcattcagcggtttggatacactctgtttgtaaagtctgcacgtggatattttgaccacttagaggccttcgttggaaacgggttttttgaatgtaaggctagacagaagaattcccagtaacttccttgtgttgtctacattcaactcacagagttgaacgttcccttagacagaacagatttgaaacactctttttgtgcaattggcaagtggtgatttcagccgctttgaggtcaatggtagaaaaggaaatatcttcgtataaaaactagacagaatcattcccacaaactgcgttgtgatgtgttcgttcaactcacagagtttaacctttcttttcatagagcagtgaggaaacagtctgtttgtcaattctgtaagtggatattctgacatcttgtggccttagttggaaacgggatttcttcatattctgctagacagaagaattcttagaaacttccttgtgttgtgtgttttcaactcacagagttgaacgatcctttacacagagcagacttgaaacactccttttgtggaatttgcaagtggagatttcagccgctttgaggtcaatggtagaataggaaatatcttcctatagaaagtagacagaatgattctcagaaactcctttgtgatgtgtgcgttcaactcacagagtttaacctttcttttcatagagcagttaggaaacactctgtttgtaaagtctgcaagtggatattcagacctccctgaggccttcgttggaaacgggatttcttcatattctgctacacagaagaattcccagtaacttccttgtgttgtgtgtgttcaactcacagagttgaactttcatttacacagagcagatttgaaacactcgttttgtggaatttgcaagtggagatttcaagcgctttgaggccaaaggcagaaaaggaaatatcttcgtataaaaactagacagaatcattctcagaaactgctctgtgatgtgtgcgttcaactctcagagtttaacttttcttttcatttagcagtttggaaacactctgtttgtaaagtctgcacgtggataatttgaccacttagaggccttcgttggaaacgggtttttttcatgtaaggctagacagaagaattccaagtaacttccttgtgttgtgtacattcaactcacagagttgaacgttcccttagacagagcagatttgaaacactctttttgtgcaattggcaaatgtagatttcaagcgctttaaggtcaatggcagaaaaggaaatatcttcgtttcaaaactagacagaatcattcccacaaactgcgttgtgatgtgttcgttcagctcacagagtttaacctttcttttcatagagcagttaggaaacagtctgtttgtcaattctgtaagtggatattctgacatcttgtggccttcgttggaaacgggatttcttcatattctgctagacagaataattctcagtaaattccttgtgctgtgtgtattcaactcacagagttgaacgatcctttacagagagcagacttgaaacactctttttgtggaatttgcaagtggagatttcagccgcttggaggtcaatggtagaataggaaatatcttcctatagaaactagacagaatgattctcagaaactcctttgtgatgtgtgcgttcaactcacagagtttaacctttcttctcatagagcagttaggaaacactctgtttataaaggctgcaagtggatattcagaaccctttgaggcgttcgttggaaacgggatttcttcatattatgctagacagaagaattcccagtaacttccttgtgttgtgtgtgtttaactcacagagttgaactttcatttacacagagcagatttgaaacactctttttgtggaatttgcaggtggagatttcaagcgctttgaggccaaaggcagaaaaggaaatatcttcgtataaaaactagacagaatcattctcagaaactgctctgcgatgtgtgggttcaactctcagagtttaacttttcttttcattcagcagtttggaaacactctgtttgtaaagtctgcacgtggatattttgaccacttagaggccttcgttggaaacgggtttttttcctgtaaggctagacagaagaattcccagtaactttccttgtgttgtgtgcattcaactcacagagatgaacgttcgcttagacagagcagatttgaaacactctatttgtgcaatttgcaagtgtagatttcaagcgctttaaggtcaatggcagaaaaggaaatatcttcgtttcaaaactagacagaatcattcccacaaactgcgttgtgatgtgttcgttcaactcacagagtttaacctttctgttcatagagcagttaggaaacactctgtttgtaaagtctgtaagtggatattctgacatcttgtggccttcgttggaaacgtgatttcttcatattctgctagacagaagaattctcagaatcttccttgtgttgtgtgtattcaactcacagagttgaacgatcctttacacagagcagacttgaaacactctttttgtggaatttgcaagtggagatttcagccgctttgaggtccatggtagaaaacgaaatatcttcgtataaaaactagacagaatgattctcagaaactcctttgtgatgtgtgcgtccaagtcacagagtttaacctttcttttcatagagcagttaggaaacactctgtttgtaaagtctgcaagtggatattcagacctctttgaggccttcgttggaaacgggatttcttcatattctgctagacagaagaattctcagaatcttccttgtgttgtgtgtattcaactcacagagttgaacgatggtttacacagagcagatttgaaacactctttttgtggaatctgcaagtggagatttcagccgctttgaggtcaatggtagaaaaggaaatatcttcgtataaaaactagacagaatgattctcagaaactcctttgtgatgtgtgcgttcaactcacagagtttaacctttcttttaatagagcatttaggaaacactctgtttgtaaagtctgcaagtggataatcagacctctttgaggccttcgttagaaacgggatttcttcatattctgctagacagaagaattcccaataacttccttgtgttgtgtgtgttcaactcacagagttgaactttcatttacacagagcagatttgaaacactctttttgtggaatttgcaaatggagatttcaagcgctttgaggccaaaggcagaaaaggaaatatcttcgtatacaaaatacacagaatcattctcagaaactgctgcgtgatgtgtgcgttcaactctcagagtttaacttttcttttcattcagcggtttggaaacactctgtttgtaaagtctgcacgtggatattttgaccacttagagaccttcgttggaaacgggtttttttcatgtaaggctagacagaagaattcccagtaacttccttgtgttgtgcgcattcaactcacagagttgaacgttcccttagacagagcagatttgaaacagcctatttgtgcaatttgcaagtgtacatttcaagcactttaaggtcaacggcagaaaaggaaatatcttcctttcaaaactagacagaatcattcccacaaactgcgttgtgatgtgttcgttcaactcacagagtttaacctttcttttcatagagcagttaggaaacagtctgtttgtaaattctgtaagtggatattctgacatcttgtggccttcgttggaaaagggatttcttcatattctgctagacagaagaattctcagtaacttccttgtgttgtgtgtattcaactcacagagttgaacgatcctttacacagagcagacttgaaacactctttttgtggaatttgcaagtggagatttcagccgctgtgaggtcaatagtagaaaaggaaatatcttcgtagaaaaactagacagaatgattctcagaaactcctttgtgatgtgtgtgttcaactcacagagtttaacctttcttttcatagagcagttaggaaacactctgtttgtaatgtctgcaagtggatattcagacctctttgaggacttcgttggaaacgggtttttttcatataaggctagacagaagaattcccaataacttccttgtgttgtgtgtgttcaactcacagagttgaactttcatttacacagagcagatttgaaacactctttttgtggaatttgcaaatggagatttcaagcgctttgaggccaaaggcagaaaaggaaatatcttcgtataaaaactacacagaatcattctcagaaactgctctgcgatgtgtgcgttcaactctcagagtttaacttttcttttgattcagcagtttggaaacactctgtttgtaaagtctgcacgtggatattttgaccacttagaggccttcgttggaaacgggtttctttcctgtaaggctagacagaagaattcccagtaacttccttgtgttgtgtaaattcaactcacagagttgaacgttcccttagacagagcagatttgaaacactctttttgtgcaattggcaagtggagatttcaagcgctttaaggtcaatggcagaaaaggaaatatcttcgtttcaaaactagacagaatcattaccacaaactgcgttgtgatgtgttcgttcatctcacagagtttaacctttcttttcatagagcagttaggaaacagtctgtttgtaaattctgtaagtggatattctgacatcttgtggccttcgttggaaacgggatttcttcatattctgctagacagaagaatactcagtaacttccttgtgttgtgtgtattcaactcacagagttgaacgatcctttacacagagcagacttgaaacactctttttgtggaatttgcaagtggagatttcagccgctttgaggtcaatagtagaaaaggaaatatcttcctagaaaaactagacagaatgattctcagaaactcctttgtgatgtgtgcgttcaactcacagagtttaacatttcttttcatagagcagttaggaaacactctgtttgtaaagtctgcaagtggatattcagacctctttgaggccttctttggaaacgggtttttttcatataaggctagacagaagaattcccagtaacttccttttgttgtgtgtgttcaactcacagagttgaactttcacttacacagagcagatttgaaacactctttttgtggaatttgcaagtggagatttcaagcgctttgaggccaaaggcagaaaaggaaatatcttcgtataaaaactagacagaatcattctcagaaaccgctctgtgatgtgtgtgttcaactctcagagtttaacttttctttccattcagcagtttggaaacactctgtttgtaaagtctgcacgtggatattttgaccacttagaggtcttcgttggaaacgggtttttttcatgtaaggctagacagaagaattcccagtaacttccttgtgttgtgtgcattctactcagagagttgaacgttcccttagacagagcagatttgaaacactctatttgtgcaaattgcaagtgtagatttcaagcgctttaaggtcaatggcagaaaagggaatatcttcgtttcaaaactagacagaatcattccctcaaactgcgttgtgatgtgttcgttcaactcacagagtttaacctttctgttcatagagcagttaggaaactctctgtttgtaaagtctgtaagtggatattctgacatcttgtggccttcgttggaaacgggatttcttcatattctgctagacagaagaattctcagtaacttccttgtgttgtgtgtattcaactcacagagttgaacgattctttacacagagcagacttgaaacactctttttgtggaatttgcaagtggagatttcagccgctttgaggtcaatggtagaaaaggaaatatcttcgtataaagagtagacagaatgattctcataaactcctttgtgatgtgtgcgttcaactcacagagtttaacttttcttttcatagagcagttaggaaacactctgtttgtaaagtctgcaagtggatattcagacctctttgaggccttcgttggaaacgggatttcttcatattttgctagacagaagaattctcagtaacttccttgtgtggtgtgtattcaactgacagagttgaactttcatttagagagagcagatttgaaacactgtttttgtggaatttgcaagtggagatttcaagcgctttggggccaaaggcagaaaaggaaatatcttcgtataaaaagtagacagaatcattctcagaaaatcctctgtgatgtgtgcgttcaactctcagagtttaacttttcttttcattcagcagtttggaaacactctgtttgtaaagtctgcacgtggatattttgaccacttagaggccttcgttggaaacgggttttttcatgtaagggtagacagaagaaatcccagtaacttccttgtgttgtgtgcattcaactcacagagttgaacgttcccttagacagagcagatttgaaacactctatttgtgcaatttgcaagtgtagatttcaagtgctttaaggtcaacggcagaaaaggaaatatcttcgtttcaaaactagacagaatcattctcagaaactgctctgcgatgtgtgcgttcaactctcagagtttaacttttcttttcattcagcagtgtggaaaaactctgtttgttaagtctgcacgtggatattttgaccacttagaggccttcgttggaaacgggtttttttcctgtaaggctagacagaagaattctcagtaacttccttgtgctgtgtgtattcaactcacagagttgaacgatcctttacagagagcagactttaaacactctttttgtggaatttgcaagtggagacttcagccgctttgaggtcaatggtagaaaaggaaatatcttcgtataaagactagacagaaagattctcagaaactcctttgtgatgtgtgcgttcaactcacagagtttaacctttcttttcatagagcagttaggaaacactctgtttctaaagtctgcaagtggatattcagacctctttgaggccttcgttggaaacgggtttttttcatataaggctagacagaagaattcccagtaacttccatgtgttgtgtgtgttcaactcagagagttgaactttcatttacactgagcagatttgaaacactctttttgtagaatttgcaaatggagatttcaagcgctttgaggccagaggcagaaaaggaaatatcttcgtataaaaactagacagaatcattctcagaaactgctctgcgatgtgtgcgttcaactctcagagtttaacttttcttttcattcagcagtttggaaacactctgtttgtaaagtctgcacgtggataatttgaccacttagaggtcttcgttggaaacgggtttttttcatgtaaggctagacagaagaattcccagtaacttccttgtgttgtgtgcattcaactcacagagttgaacgttcccttagacagagcagatttgaaacactctatttgtgcaatttgcaagtgtagttttcaagctctttaaggtcaacggcagaaaaggaaatatcttggtttcaaaactagacagaatcattcccacaaactgcgttgtgatgttttcgttcaactcacagagtttaacctttctgttcatagagtagttaggaaacactctgtttgtaaagtctgtaagtggatattctgacatcttgtggccttcgttggaaacgggatttcttcatattctgctagacagaagaattctcagtaacttccttgtgttgtgtgtattcaactcacagagttgaacgatcctttacacagagcggacttgaaacactctttttgtggaatttgcaagtggagattttagccgatttgaggtcaatggtagaataggaaatatcttcctatagaaacaagacagatagattctcagaaactcctttgtgatgtgtgcgttcaactcacagagtttaacctttcttttcatagagcagttaggaaacactctgtttgtaaagtctgcaagtggatattcagacctctttggggccttcgttggaaacgggtttttttcatataaggctagacagaagaattctcagtaacttccttgtgttgtgtgtattcaactgacagagttgaactttcatttagagagagcagatgtgaaacactgtttttgtggaatttgcaagtggagatttcaagcgctttggggccaaaggcagaaaaggaaatatcttcgtataaaaactagacagaatcattctcagaaactgctgcgtgatgtgtgcgttcaactctcagagtttaacttttcttttcattcagcggtttggaaacactctgtttgtaaagtctgcacgtggatattttgaccacttagaggccttcgttggaatcgggttttttgcatgtaaggctagacagaagaattcttagtaacttccttgtgttgtgtgtattcaactcacagagttgaacgatcctttacacagagcagacttgtaacactctttttgtggaatttgcaagtggagatttcagccgctttgaagtcaaaggtagaaaaggaaatatcttcctataaaaactagacagaatcattcccacaaactgcgttgtgatgtgttcgttcaactcacagagtttaacctttctgttcatagagcagttaggaaacactctgtttgtaaagtctgtaagtggatattcagacatcttgtggccttcgttggaaacgggatttgttcatattctgctagacagaataattctcagtaacttccttgtgttgtgtgtattcaactcacagtagttgaaggatcctttacagacagcaggcttgaaacactctttttgtcgaatttgcaagtggagatttcagccgctttgtggtcaatggtagaatacgaaacatcttcttatagaaactagacaaaatgattctcagaaactcctttgtgatgtgtgcgatcaactcacagagtttaacctttcttttcatagagcagttaggaaacactctgtttgtaaagtctgcaagtggatattcagacctctttgaggccttcgttggaaacgggttgttttcatataaggctagacagaagaattcccagtaacttccttgtgttgtgtgtgttcaactcacagagttgaactttcatttacacagagcagattggaaacactctttttgtggaatttgcaagtggagatttcaagcgctttgaggccaaaggctgaaaaggaaatatcttcgtataaaaactagacagaatcattctcagaaactactctgcgatgtttgcgttcaactctcagagtttaacttttcttttcattcagcagtttggaaacactctgtttgtaaagtctgcacatggatattttgaccacttagaggccttcgttggaaacgggtttctttcctgtaaggctagacagaagaattcccagtaacttccttgtgttgtgtgcattcaactcacagagttgaacgttcccttagacagagcagatttgaaacactctatttgtacaatttgcaagtgtagatttcaagcgctttaaggtcaacggcagaaaaggaaatatcttcgtttcaaaactagacagaatcattcccacaaactgcattgtgatgtgttcgttcaactcacagagtttaacctttctgttcatagagcagttaggaaacactctgtttgtaaagtctgcaagtgcatattcagacctctttgaggccttcgttggaaacgttatttcttcatattatgctagacagaagaattctcagtaacttccttgtgttgtgtgtattcaactcacagagttgaacgatcctttaaacagagcagacttgaaacactctttttgtggaatttgcaagtggagatttcagccgctttgaggtcaatggtagaaaaggaaatatcttcgtatagaaacaagacagaatgattctcagaaactcctttgtgatgtgtgcgttcaactcacagagtttaacctttctttgcatagagcacttaggaaacactctgtttgtaaagtctgcaagtggatattcagacctctttgaggccttcgttggaaacgggtttttttcatataaggctagacagaagaattctcagtaacttccttgtgttgtgtgtattcaactgacagagttgaactttcatttagagagagcagatttgaaatactgtttttgtggaatttgcaagtggagatttcaaacgctttggggccaaaggcagaaaaggaaatatcttcgtatgaaaactagacagaatcattctcagaaactgctgtgtgatgtgtgcgttcaactctcagagtttaacttttcttttcattcagcggtttggaaacactctgtttgtaaagtctgcacgtggatattttgaccacttagagcccttcgttggaaacgggattttttcatgtaaggctagacagaagaattcccagtaacttccttgtgttgtgtgcattcaactcacagagttgaacgttctcttagacagagcagatttgaaacactctatttgtgcaatttgcaagtgtagatttcaagcgctttaaggtcaatggcagaaaaggaaatatcttcgtttcaaaactagacagaatcattcccacaaactgcgttgtgatgtgttcgttcaactcacagagtttaacctttctgttcatagagcagttaggaaacacgctctttgtaaagtccgtaagtggatattctgacatcttctggccttcgttggaaacgggatttcttcatattccgctagacagaagaattctcagtaacttccttgtgttgtgtgtattcaactcacagatttgaacgatcctttacacagagcagacttgaaacactctttttgtggaatttgcaagtggagatttcagccgctttgaggtcaatggtagaaaaggaaatatcttcgtataaaaactagacagaatgattctcagaaacttctttgtgatgtgtgcgttcaactcacagagtttaacctttctattcatagagcagttaggaaacactctgtttgtaaactctgcaagtggatattcagacctctttgaggccttcgttggaaacgggatttcttcatactgtgctagacagaagaattctcagtaacttccttgtgttgtgtgtattccactcacagagttgaactttcatttagagagagcagatttgcaacactgtttttgtggaatttgcaaatggagatttcaagcgctttggggccaaaggcagaaaaggaaatatcttcgtataaaaactagacagaatcattctcagaaactgctctgcgctgtgtgcgttcaactctcagagtttaacttttcttttcattcagcagtttggaaacactctgtttgtaaagtctgcacgtggataacttgaccacttagaggccttcgttggaaacgggtttttttcctgtaaggctagacagaagaattcccagtaacttccttgtgttgtgtgcattcaactcacagagttgaacgttcccttagacagagcagatttgaaacactctatttgtgcaatttgcaagtgtagttttcaagctctttaaggtcaacggcagaaaaggaaatatcttcgtttcaaaactagacagaatcattcccacaaactgcgttgtgatgtgttcgttcaactcacagagtttaacctctctgttcatagagcagttaggaaacactctgtttgtaaagtctgtaagtggatattctgacatcttgtggccttcgttggaaacgggatttcttcatattctgctagacagaagaattctcagaaacttcctggtgttgtgtgttttcaactcacagagttcaacgatcctttacacagagtagacttgaaacactctttttgtggaattggcaagtggagatttcagccgctttgaggtaaagggtagaaaaggaaatatcttcgtacaaaaactagacagaatgattctcagaaactcctttgtgatgtgtgcgttcaactcacggagtttaccctttcttttcatagagcagttaggaaacactctgtttgtaaagtctgcaagtggatattcagacatccttgaggctttcgttggaaacgggatttcttcatattctgctagaaagaagaattcccagtaacttaccttgtgttgtgtgtgttgaactcacagagttgaactttcatttacacagagcagatttgaaacactctttttgtggaatttgcaagtggagatttcaagcgctttcaggccaaaggcagaaaaggaaatatcttcgtataaaaactagacagaatcattctcagcaaactgctctgcgatgtgtgcattcaactctcagagtttaacttttcttttcattcagcagtttggaaacactctgtttgtaaagtctgcacgtggataacttgaccacttagaggccttcgttggaaacgggtttttttcatgtaaggctagacagaagaattcccagtaacttccttgtgttgtgtacattcaactcacagagttgaacgttcccttagacagagcagatttgaaacactctttttgtgcaattggcaagtggagatttcaagcgctttaaggtcaatggcagaaaaggaaatattttcgtttcaaaactagacagaatcattcccacaaactgcgttgtgatgtgttggtacaactcacagagtttaacctttctgttcatagagcagttaggaaacactctgtttgtaaagtctgtaagtggatattcagacatcctgtggccttcgttggaaacgggatttcttcatattctgctagacagaagaattctcagtaacttccttgtgttgtgtgtattcaactcacagagttcaacgatcctttacacagagcagtcttgaaacactctttttgtggaatttgcaagtggagatttctgacgctttgaggtcaatggtagaataggaaatatcttcctatagaaactagacagaatgattctcagaaactcctttgagatgtgtgtgttcaactcacagagtttaacctttcttttcatagagcagttaagaatcactctgtttgtaaagtctgcaagtggatattcagacctctttgaggccttcgttggaaacgggtttttttcatataaggctagacagaagaattctcagaaacttccttgtgttgtgtgttttcaactcacagagttgaacgatcctttacacagagcagacttgaaactctctttttgtggaatttgcaattggagatttcagccgctttgaggtcaatggtagaataggaaataccttcctatagaaactagacagaatgattctcagaaactcctttgtgatgtgtgcgttgaactcacagagtttaacctttcttttcatagagcagttaggaaacactctgtttgtaaagtctgcaagtggatattcagacatctttgaggctttcgttggaaacgggatttcttcatattctgctagacagaagaattcccagtaacttccttgtgttgtgtgtgttcaactcacagagttgaactttcatttacacagagcagatttgaaacactctttttgtggaatttgcaagtggagatttcaagcgctttgaggccaaaggcagaaaaggaaataccttcgtataaaaactagacagaatcattctcagaaactgctctgcgatgtgtgcgttcaactctcagagtttaacttttcttttcattcagcagtttggaaacactctgtttgtaaagtctgcacgtggatattttgaccacttagaggccttcgttggaaacgggtttttttcctgtaatgctagacagaagaattcccagtaacttccttgtgttgtgtgaattcaactcacagagttgaacgttcccttagacagagcagatttgaaacactctatttgtgcaatttgcaagtgtagatttcaagcgctttaaggtcaacgccagaaaaggaaatatcttcatttcaaaactagacagaatcattcccacaaactgcgttgtgatgtgttcgttcaactcacagagtttaacctttctgttcatagagcagttaggaaacactctgtttgtaaagtctgtaagtggatattcagacatcttgtggccttcgttggaaacaggatttcttcatattctgctagacagaagaattctcagaatcttccttgtgttgtgtgtattcaactcacacggttgaacgatcctttacacagagcagatttgaaacactcatttggtggaatttgcaagtggagatttcagccgctttgaggtcaatggtagaaaaggaaatatcttcgtataacaactagacagaatgattctcagaaactcctttgtgatgtgtgcgttcaactcacagagtttaacctttcttttcatagagcagttaggaaacactctgtttgtaaagtctgcaagtggatattcagacctccttgaggtcttcgttggaaacgggtttttttcatataaggctagacagaagaattcccagtaacttccttgtgttgtgtgtgttcaactcacagagttgaactttcatttacacagagcagatttgaaacactctttttgtggaatatgtaagtggagatttcaagcgctttgaggccaaaggcagaaaaggaaatatcttcgtttcaaaactagacagaatcattctcagaaactgctgcgtgatgtgtgcgttcaactctcagagtttaacttttcttttcattcagcggtttggaaacactctgtttgtaacatctgtacgtggatattttgaccacttagaggccttcgttggaaacgggtttttttcatgtaaggctagacagaagaattcccagtaacttccttgtgttgtgtgcattcaactcacagagttgaacgttcccttagacagagcagatttgaaacactctatttgagcaatttgcaagtgtagttttcaagctcttttaggtcaacggcagaaaaggaaatatcttggtttcaaaactagacagaatcattcccacaaactgcgttgtgatgtgttcgttcaactcacagcgttttacctttctgttcatagagcagttaggaaacactctgtttgtcaagtctgtaagtggatattctgacatcttgtggccttcgttggaaatgggatttcttcatattctgctagacagaagaattctcagtaacttccttgtgttgtgtgtattcaactcacagagttgcacgatcctttacacagagcagacttgaaacaatctttttgtggaatttgcaagtggagatttcagccgctttgagttcaatggtagaataggaaatatcttcctatagaaactagacagaatcattcccacaaactgcgttgtgatgtgttcgttcaactcacagagtttaacctttctgttcatagagcagttaggaaacaccctgtttgtaaagtctgcaagtggatattcagacctctttgaggccttcgttggaaacgggatttcttcatattatgctagacagaagaattctcagtaacttccttgtgttgtgtgtattcaactgacagagttgaactatcatttagagagagcagatttgaaacactgtttttgtggaatttgcaagtggagatttcaagcgctttggggccaaaggcagaaaaggaaatatcttcgtataaaaactagacagaatcattctcagaaactgctctgcgatgtgtgcgttcaactctcagagtttaacttttcttttcattcagcagtttggaaacactctgtttgtaaagtctgcacgtggatattttgaccacttagaggccttcgttggaaacgggtttttttcctgtaaggctaaacagaagaattcccagtaacttccttgtgttgtgtacattcaactcacagagttgaacgttcacttagacagagcagatttgaaacactctttttgtgcaattggcaaatggagatttcaagcgctttaaggtcaatggcagaaaaggaaatatcttcgtttcaaaactagacagaatcattcccacaaactgcgttgtgatgtgttcgttcaactcacagagtttaacctttcttttcatagagcagttaggaaacagtctgtttgtcaattctgtaagtggatattctgacatcttgtgaccttcgttggaaacgggatttcttcatattctgctagacaaaagaattctcagtaacttccttgtgttgtgtttattcaactcacagagttgaatgatcctttacacagagcagacttgaaacactctttttgtggaatttgcaagtggagattacagccgctttgaggtcaatggtagaaaagtaaatatcttcgtataaagactagacagaatgattctcagaaactcctttgtgatgtgtgggttcaactcacagagtttaacctttctttttcatagagcagttaggaaacactctgtttgtaaagtctgcaagtggatattcagacctcgttgaggccttcgttggaaacgggatttcttcatattctgctagacagaagaattctcagtaacttccttgtgttgtgtttattcaactcacagagttgaatgatcctttacacagagcagacttgaaacactctttttgtggaatttgcaagtggagatttcagccgctttgcggtcaatggtagaaaagtaaatatcttcgtataaagactagacagaatcatgctcagaaactgctctgcgatgtgtgcgttcaactctcagagtttaacttttcttttcattcagcagtttggaaacactctgtttgtaaagtctgcacgtggataatttgaccacttagaggccttcgttggaaacgggtttttttcatgtaaggctagacagaagaattcccagtaacttccttgtgttgtgtgcattcaactcacagagttgaacgttccctttgacagagcagatttgaaacactgtatttgtgcaatttgcaagtgtagatttcaagcgctttaaggtcaatggcagaaaaggaaatttcttcgtttcaaaactagacagaatcattcccacaaactgcgttgtgatgtgctcgttcatctcacagagtttaacctttcttttcatagagcagttaggaaacactctgtttgtaaattctgtaagtggatattctgacatcttgtggccttcgctggaaacgggatttcttcatattctgctagacagaagaattctcagtaacttcccttgtgttgtgtgtattcaactcacagagttgaacgatcctttacacagagcagacttgaaacactctttttgtggaatttgcaagtggagatttcagccgctttgaggtcaatggtagaataggaaatatcttcctatagaaagtagacagaatgattctcagaaactcctttgtgatgtgtgcgttcaactcacagagtttaacctttcttttcatagagcagttaggaaacactctgtaaagtctgcaagtggatattcagacatctttgaggccttcgttggaaacgggatttcttcatattatgctagacagaagaattctcagtaacttccttgtgttgtgtgtattcaactgacagagttgaactttcatttagagagagcagatttgaaacactgtttttgtggaatttgcaagtggagatttcaatcgctttggggccaaaggcagaaaaggaaatatcttcgtataaaaactagacagaatcattctcaaaaactgctgcgtgatgtttgcgttcaactctcagagtttaacttttcttttcattcagcggtttggaaacactctgtttgtaaagtctgcacgtggatattttgaccacttagaggccttcgttggaaacgggtttttttcatgtaaggctagacagaagaattcccagtaacttccttgtgttgtgtgcattcaactcacagagttgaacgttcccttagacagagcagatttgaaacactctatttgtgcaatttgcaagtgtagatttcaagcgctttaaggtcaacggccgaaaaggaaatatcttcgtttcaaaactagacagaatcattcccacaaactgcgttgtgatgtgttcgttcaactcacagagtttaacctttctgttcatagagcagttaggaaacactctgtaaagtctgtaagtggatattctgacatcttgtggccttcgttggaaacgggatttcttcatattctgctagacagaagaattcccagtaacttccttgtgttgtgtgtgttcaactcacagagttgaactttcatttacacagagcagatttgaaacaccctttttgtggaatttgcaaatggagatttcagccgcgttgaggtcaatggtagaaaaggaaatatcttcgtttcaaaactagacagaatgattctcagaaactcctttgtgatgtgtgccttcaactcacagagttcaacctttctttttatagagcagttgggaaacactctgtttgtaaagtctgcatgtgcatattcagagttctttgaggccttcgttggaagcgggatttcttcatattctgctagacagaagaattctcagtaacttccttgtgttgtgtgtattcaactcacagagttgaacgatcctttacacagagcagacttgaaacactctttttgtggaatttgcaattggagatttcagccgctttgaggtcaatggtagaataggaaatatcttcctatagaaactagacagaatcattctcagaaactgctctgcgatgtgtgcgttcaaatctcagagtttaacttttcttttcattcaacagtttgaaaacactctgtttgtaaagactgcacgtggatattttgaccacttagaggccttcgttggaaacgggtttttttcctgtaaggctagacagaagaattcccaggaacttccttgtgttgtgtacattcaactcacagagttgaacgttcccttagacagagcagatttgaaacactctttttgtgcaattggcaagtggtgatttcagcctctttgaggtcaatggtagaaaaggaaatatcttcgtataaaaactagacagaatcattcccacaaactgcgttgtgatgtgttcgttcaactcacagagtttaacatttctgttcatagagcagttaggaaacactctgtttgtaaagtctgtaagtggatattctgacatcttgtggccttcgttggaaacgggatttcttcatattctgctagacagaataattctcagtaacttccttgtgttgtgtgtactcaactcacagagttgaacgatcctttacagagagcagacttgaaacactctttttgtggaatttgcaagtggagatttcagccgctttgaggtcaatggtagaaaaggaaatatctttgtataaagactagacagaatgattctcagaaactcctttgtgatgtgtgcgttcaactcacagagtttaacctttcttttcatagagcagttaggaaacactctggttgtaaagtctgcaagtggatattcagacctctttgaggccttcgttggaaacgggatttcttcatattctgctagacagaagaattcccagtaacttccttgtgttgtgtgtattcaactcacagagttgaacgatcctttacacagagcagtcttgaaacactctttttgtggaatttgcaagtggagatttctgccggtttgaggtcaatggtagaataggaaaaaacttcctatagaaactagacagaatgattctcagaaactgctgcgtgatgtgtgcgttcaactctcagagtttaacttttcttttcattcagcggtttggaaacactctgtttgtaaagtctgcacgtggatattttgaccacttagaggccttcgttggaaacgggtttttttcatgtaaggctagacagaagaattcccagtaacttccttgtgttgtgtacattcaactcacagagttgaacgttcccttagacacagcagatttgaaacactctttttgtgcaattggcaagtggagatttcaagcgctttaaggtcaatggcagaaaaggaaatatcttcgtttcaaaactagacagaatcattcccacaaactgcgttgtgatgtgttcgttcaactcacagagtttaacctttcttttcatagagcagttaggagacactctgtttgtaaagtctgcaagtggatattcagacctctttgaggccttcattggaaacgggatttcttcatattatgatacacagaagaattctcagtaacttccttgtgttttgtgtattcaactcacagagttgaacgatcctttacacagagcagacttgaaacactctttttgcggaatttgcaagtggagatttcagccgctttgaggtcaatggtagaataggaaatatcttcctatagaaactagacagaatgattctcagaaactcctttgtgatgtgtgcgttcaactcacagagttcaacctttcttttcatagagcagttgggaaacactctgtttgtaaagtctgcaagtggatattcagacttctttgaggccttcgttggaaacgggatttcttcatattatgctagacagaagaattctcagtaacttcttgtgttgtgtgtattcaactgacagagttgaactttcatttagacagatcagatttgaaacactgttttcgtggaatttgcaagtggaggtttcaagcgctttgaggccaaaggcagaaaaggaaatatcttcctataaaaaccagacagaatcattctcagaaactgctctgcgatgtgtgcgttcaactctcagagtttaactttgcttttcattcagcagtttggaaacactctgtttgtaaagtctgcacgtggataattagaccacttagaggccttcgttggaaacgggtttttttcatgtaaggctagacagaagaattcccagtaacttccttgtgttgtgtgcattcaactcacagagttgaacgttcccttagacagagcagatttgaaacactctatttctgcaatttgcaagtgtagatttcaagcgctttaaggtcaatggcagaaaaggaaatatcttcgtttcaaaactagacagaatcattcccacaaactgcgttgtgatgtgttcgttcaactcacagagtttaacctttcttttcatagagcagttaggaaacagtctgtttgtaaattctgtaagtggatattctgacatcttttggccttcgttggaaacgggatttcttcatattctgctagacagaagaattctcagaatcttccttgtgttgtgtgtattccactcacagagttgaacgatggtttacacagagcagatttgaaacactctttgtgtggaatttgcaagtggagatttcagccgctttgaggtcaatggtagaaaaggaaatatcttcgtataaaaactagacagaatgattctcagaaactcctttgtgatgtgtgtgttcaactcacagagtttaacctttcttttcatagagcagttagtaaacactctgtttataaagtctgcaaatggatattcagacccctttgaggccttcgttggaaacgggatttcttcatattatgctagacagaagaattcccagtaacttccttgtgttgtgtgtgttcaactcacagagttgaactttgatttacacagagcagatttgaaacactctttttgtggaatttgcaagtggagatttcaagcgctttgtggccaaaggcagaaaaggaaatatcttcgtataaaaactagacagaatgattctcagaaactcctttgtgatgtgtgcgttcaactcacagagtttaacctttcttttcattcagcggtttggaaacactctgtttgtaaagtctgcacgtggatattcagacctctttgaggccttcgttggaaacgggtttttttcatgtaaggctagacagaagaattcccagtaacttccttgtgttgtgtgcattcaactcacagagttgaacgttcccttagacagagcagatttgaaacactctatttgtgcaatttgcaagtgtagttttcaagctctttaaggtcaacggcagaaaaggaaatatcttggtttcaaaactagacagaatgattctcagaaactcctctgtgatgtgtgcgttcaactcacagagtttaacctttcttttcatagagcagttaggaaacactctgtttgtaaagtctgcatgtggatattcagacctccttgaggccttctttggaaacgggatttcttcatattatgctagacagaggaattctcagtaacttccttgtgttgtgtgtattcaactcacagagttgaacgatgctttacacagagcagacttgaaacactctttttgtggaatttgcaagtggagatttcagccgctttgaggtcaatggtagaataggaagtatcttcctatagaaactagacagaatgattctcagaaactactttgtgatgtgtgcgttcaactcacagagtttaacctttcttttcatagagcagttaggaaacactctgtttgtaaagtctgcaagtggatattcagacctccttgaggccttctttggaaacgggatttcttcatattatgctagacagaagaatccccagtaacttcccttgtgttgtgtgtgttcaactcacagagttgaactttgatttacacagagcagatttgaaacactctttttgtggaatttgcaagtggagatttcaagcgctttggggccaaaggcagaaaaggaaatatcttcgtataaaaactagacagaatcattctcagaaactgctctgcgatgtgtgcgttcaattctcagagtttaacttttcttttcattcagcagtttggaaacactctgtttgtaaagtctgcacgtggatattttgaccacttagaggccttcgttggaaacgggtttttttcttgtaaggctagacagaagaattcctagtaacttccttgtgttgtgtacattcaactcacagagttgaacgttcccttagacagagcagatttgaaacactctttttgtgcaattggcaagtggtgatttcagccgctttgaggtcaatggtataaaaggaaatatcttcgtattaaaactagacagaatcattcccacaaactgcgttgtgatgtgttcgttcaactcacagagtttaacctttctgttcatagagcagttaggaaacactttgtttgtaaagtctgtaagtggatattctgacatcttgtggccttcgttggaaacgggatttcttcatattctgctagacagaagaattctcagtaacttccttgtgttgtgtgtattcaactcacagagttgaacgatcctttacacagagcagacttgaaacacactttttgtggaatttgcaagtggagatttcagccgttttgaggtcaatggtagaaaaggaaatatcttcgtataaagactagacagaatgattctcagaaactcctttgtgatgtgtgtgttcaactcacaaagtttaagctttcttttcatagagcagttagtaaacactctgtttataaagtctgcaagtggatattcagacccctttgaggccttcgttggaaaccggatttcttcatattatgctagacagaagaattcccagtaacttccttgtgttgtgtgtgttcaactcacagagttgaactttcatttacacagagcagatttgaaacactctttttgtggaatttgcaagtggagatttcaagcgctttgaggctaaaggcagaaaaggaaatatcttcgtataaaaactagacagaatcattctcagaaactgctctgcgatgtgtgcgttcaactctcagagtttaacttttcttttcattcagcagtttggaaacactctgtttgtaaagtctgcacgtggatattttgaccacttagaggccttcgttggaaacgggtttttttcctgtaagtctagacagaagaattcccagtaacttccttgtgttgtgtgcattcaactcacagagttgaacgttcccttagacagagcagatttgaaacactctatttgtgcaatttgcaagtgtagttttcaagctctttatggtcaacggcagaaaaggaaatatcttcgtttcaaaactagacagaatcattcccacaaactgcgttgtgatgtgttcgttcaactcacagagtttaacctttctgttcatagagcagttaggaaacactctgtttgtaaagtctgtaagtggatattctgacatcttatggccttcgttggaaacgggatttcttcatattctgctagacagaagaattctcaggaacttccttgtgttgtgtgtattcaactcacagagttgaacgatcctttacacagagcagacttgaaacactctttttgtggaatttgcaagtggagatttcagccgctttgagttcaatggtagaataggaaatatcttcctatagaaactacacagaatgattctcagaaactcctttgtgatgtgtgtgttcaactcacagagtttaacctttcttttcatagagcagttaggaaacactctgtttgtaaagtctgcatgtggatattttgacctctttgaggccttcgttggaaacgggttttttcatgtaaggatagacagaagaattcccagtaacttccttgggttgtgtgtgttcaactcacagagttgaactttcatttacacagagcagatttgaaaaactctttttgtggaatttgcaaatggagatttcaagcgctttgaggccaaaggcagaaaaggaaatatcttcgtataaaaactagacagaatcattctcagaaactgctctgtgatgtgtgcgttgaactctcagagtttaacttttcttttcattcagcagtttggaaacactctgtttgtaaagtctgcacgtggataatttgaccacttagaggccttcgttggaaacgggtttttttcatgtaaggctagagagaagaattcccagtaacttccttgtgttgtgtacattcaactcacagagttgaacgttcccttagacagagcagatttgaaatactctttttgtgcaattggcaagtggagatttcaagcgctttaaggtcaatggcagaaaaggaaatatcttcgtttcaaaactagacagaatcattcccacaaactgcgttgtgatgtgttcgttcaactcacagagtttaacctttctgttcatagagcagttaggaaacactctgtttgtaaagtctgtaagtggatattcagacctctttgaggccttcgttggaaacgggatttcttcatattctgctagacagaataattctcagtaacttccttgtgttgtgtgtattcaactcacagagttgaaggatcctttacagagagcaggcttgaaacactctttttgtggaatttgcaagtggaggtttcagccgctttgaggtcaatagtagaaaaggaaatatcttcctagaaaaactagacagaatgattctcagaatctcctttgtgatgtgtgcgttcaactcacagagtttaacctttcttttcatagagcagttaggaaacactctgtttgtaaagtctgcaagtggatattctgacctctttgaggccttcgttggaaacgggttttttcatataagactagacagaagaattctcagtaacttccttgtgttgtgtgtattcaactcacagagttgaacgatcctttacacagagcagacttgaaacactctttttgtggaatttgcaagtggagatttcagccgctttgaggtcaatggtagaaaaggaaatatcttcgtatatagactagacagaatgattctcagaaactcctttgtgatgtgtgtgttcaactcacagcagtttaacctttcttttcatagagcagttagtaaacactctgtttataaagtctgcaagtggatattcagacccctttgaggccttcgttggaaacgggaattcttcatattatgctagacagaagaattcccagtaactttccttgtgttgtgtgtgttcaactcacagagttgaactttcatttacacagagaagatttgaaacactctttttgtggaatttgcaagtggagatttcaagcgctttgaggccaaaggcagaaaaggaaatatcttcgtttcaaaactagacagaatcattctcagaagctgctgcgtgatgtgtgcgttcaactctcagagtttaacttttcttttcattcagcggtttggaaacactctgtttgtgaagtctgcacgtggatattttgaccacttagaggccttcgttggaaatgggttttttgcatgtaaggctagatagaagaattctcagtaacttccttgtgttgtgtgtattcaactcacagagttgaacgatcctttacacagagcagacttgtaacactctttttgtggaatttgcaagtggagatttcagccgctatgaagtcaaatgtagaaaaggaaatatcttcctataaaaactagacagaatcattcccacaaactgcgttgtgatgtgttcgttcaactcacagagtttaacctttctgttcatagagcagttaggaaacactctgtttgtaaagtctgtaagtggatattctgacatcttgtggccttcgttggaaacgggatttcttcatattctgctggacagaagaattctcagtaacttccttgtgttgtgtgtattcaactcacagagttgaacgatcctttacacagagcagacttgaaacgctctttttgtggaatttgcaagtggagatttcagccacgttgaggtcaatggtagaaaaggaaatatcttcgtataaaaactagacagaatgattctcagaaactcctttgtgatgtgtgctttcaactcacagagcttaacctttcttttcatagagcagttaggaaacactctgtttgtaaagtctgcaagtggatattcagacctctttgaggccttcgttggaaacgggtttttttcatataaggctagacagaagaattctcagtaacttccttgtgttgtgtgtattcaactcacagagttgaacgatcctttacacagagcagacttgaaacactctttttgtggaatttgcaagtggagatttcagccgctttgaggtcaatggtagaataggaaatatcttcctatagaagctagacagaatgattctcagaaactcctttgtgatgtgtgcgttcaactcacagagtttatcctttcttttcatagagcagttaggaaacactctgtttgtaaagtctgcatatggatattcagacatctttgaggccttcgttggaaacgggatttcttcatgttctgctagacagaagaattcccagtaacttccttgtgttgtgtgtgttcaactgacagagttgaactttcatttagacagagcagatttgaaacactctttttgtggaatttgcaattggagatttcaagcgctttgaggccaaaggcagaaaaggaaatatcttcgtataaaaactagacagaatcattctcagaaactgctgcgtgatgtgtgcgttcaactctcagactttaacttttcttttcattcagcggtttggaaacactgtgtttgtaaagtctgcacgtggatattttgaccacttagaggccttcgttggaaacgggtttttttcatgtaaggctagacagaagaattcccagtaacttccttgtgttcgtgtacattcaactcacagagttgaacgttcccttagacagagcagatttgaaacactctttttgtgcaattgacaaatggagatttcaagcgctttaaggtcaatggcagaaaaggaaatatcttcgtttcaaaactagacagaatcattctcagaaactgctctgcgatgtgtgcgttcaactctcagagtttaacttttcttttcattcagcagtttggaaacactctgtttgtaaagtctgcacgtggataacttgaccacttagaggccttcgttggaaacgggttttgttcatgtaaggctagacagaagaattctcaagtaacttccttgtgttgtgtgtattcaactcacagagttgaacgatcctttacacagagcagacttgtaacactctttttgtgtaatttgcaagtggagatttcagccgctttgaagtcaaaggtagaaaaggaaatatcttcctataaaaactagacagaatgattctcagaaactcctttgtgatgtgtgtgttcaactcacagagtttaacctttcttttcatagagcagttagaaaacactctgtttctaaagtctgcaagtggatattcagacccctttgaggccttcgttggaaacgggatttcttcatattatgctagacagaagaattcccagtaacttcccttgtgttgtgtgtgttcaactcacagagttgaactttcatttacacagagcagatttgaaacactctttttgtggaatttgcaaatggagatttcaagcgctttgaggccaaaggcagaaaaggaaatatcttcgtataaaaactagacagaatcattctcagaaactgctctgcgatgtgtgcgttcaactctcagagtttaacttttcttttcattcagaagtttggaaacactctgtttgtaaagtctgcacgtggataacttgaccagttagaggccttcgatggaaacgggtttttttcatgtaaggctagacagaagaattcccagtaacttccttgtgttgtgtacattcaactcacagagttgaactttcccttagacagagcagatttgaaacactctttttgtgcaattggcaagtggagatttcaagcgctttgaggtcaatggcagaaaaggaaatatcttcgtttcaaaactacacagaatgattctcagaaactcctttgtgatgtgtgcgttcaactcacagagtttaacctttcttttcatagaacagttaggaaacactctgtttgtaaagtctgcaagtggatattcagacctccttgaggctttcgttggaaacgggatttcttcatattctgctagaaagaagaattctcagtaacttccttgtgttgtgtgtattcaactcacagagttgaacgatcctttacacagagcagacttgaaaccctctttttgtggaatttgcaagtggagatttcagccgctttgaggtcaatggtagaataggaaatatcttcctatagaaactagacagaatgattctcataaactcctttgtgatgtgtgcgttcaactcacagtagtttaacctttcttttcatagagcagttaggaaacactctgtttgtaaagtctgcaagtcgatattcagacctctttgaggccttcgttggaaacgggatttcttcatattctgctagacagaagaattctcagaaacttcctggtgttgcgtgttttcaactcacagagttcaacgatccgttacacagagtagacttgaaaaactctttttgttgaattggccagtggagatttcagccgctttgaggtcaatggtagaaaaggaaatatcttcgtataaaaactagacagaatgattctcagaaactcctttgtgatgtgtgcgttcaactcacagagtttaacctttcttttcatagagcatttaagaaacactctggttgtaaagtctgcaagtggatattcagacctcgttgaggcctttgttggaaacgggatttcttcatattatgctagacagaagaattcccagtaacttccttgtgttgtgtgtgttcaactcacagagttgaactttcatttacacagagcagatttgaaacactctttttgtggaatttgcaagtggagatttcaagcgctttgaggccaaaggcagaaaaggaaatgtcttcgtttcaaaactagacagaatgattctcagaaactcctttgtgatgtgggcgttcaactcacagagtttaacctttcttttcatagagccgttaggaaacactctgtttgtaaattctgcacgtggatatttggacttctttgaggccttcgttggaaacgggtttttttcatgtaaggctagacggaagaattcccagtaacttccttgtgttgtgtacattcaactcacagagttgaacgttcccttagacagagcagatttgaaacactctttttgtgcaattggcaaatggagatttcaagcgctttaagttcaatggcagaaaaggaaatatcttcgtttcagaactagacagaatcattcccacaaactgcgttgtgatgtgttcgttcaactcacagagtttaacctttcttttcatagagcacttaggaaacagtctgtttgtcaattctgtaagtggatattctgacatcttgtggccttcgttggaaacgggatttcttcatattctgctagacagaagaattctcagtaacttccttgtgttgtgtgtattcatctcacagagttgaacgatcctttacacagagcagacttgaaacattctttttgtggaatttgcaagtggagatttcagccgctttgaggtcaatggtagaatgggaaatatcttcctatagaaactagacagaatgattctcagaaactcctttgtgatgtgtgcgttcaactcacacagttcaacctttcttttcatagagcagttgggaaacactctgtttgtaaagtctgcaagtggatattcagacttctttgaggccttcgttggaagcgggatttcttcatgttctgctagacagaagaattctcagtaactgcctgtgttgtgtgtattcaactcacagagttgaacgatcctttacacagagcagacttgaaacactctttttgtggaatttgcaagtggagatttcagccgctttgaggtcaatggtagaataggaaatatcttcctatagaaactagacagaatcattctcagaaactgctgcgtgatgtgtgcgttcaactctcagagtttaacttttcttttcattcatcggtttggaatcactctgtttgtaaagtctgcacgtggatattttgaccacttagaggccttcgttggaaacgggttttttcatgtaaggctagacagaagaattctcagtaacttccttttgttgtgtgtattcaactcacagagttgaacgatcctttacacagagcagatttgaaacactctttttgtgccattggcaagtggagatttcaagcgcttaaaggtcaatggcagaaaaggaaatatcttcgtttcaaaactagacagaatcattcccacaaactgcgttgtgatgtgttcgttcaactcacagagtttaacctttcttttcatagagcagttaggaaacagtctgtttgtcaattctgtaagtggatattctgacatcttgtggccttcgttggaaacgggatttcttcatattctcctagacagaagaattctcagtaacttcccttgtgttgtgtgtattcaactcacagagttgaacgatcctttacacagagcagacttgaaacactctttttgtggaatttgcaagtggagatttcagccgctttgaggtcaatggtagagtaggaaatatcttcgtataaagactagacagaatgattctcagaaactcctttgtgatgtgtgcgttcaactcacagagtttaacctttcttttcatagagcagttaggaaacactctgtttgtaatgtctgccagtggatattcagacatctttgaggctttcgttggaaacgggttttcttcatattctgctatacagaagaattctcagtaacttccttgtggtgtgtgtattcaactgacagagttgaactttcatttagagagagcagatttgaaacactgtttttgtggaatttgcaagtggagatttcaagcgctttggggccaaaggcagaaaaggaaatatcttcgtataaaaactagacagaatcattctcagaaactgctgggtgatgtgtgcgttcaactctcagagtttaacttttctttttattcagcggtttggaaacactctgtttgtaaagtctgcacatggatattttgaccacttagaggccttcgttggaaacgggtttttttcatgtaaggctagacagaagaattcccagtaacttccttgtgttgtgtacattcaactcacagagttgaacgttcccttagacagagcagatttgaaacactctttttgtgcaattggcaagtggtgatttcagccgctttgaggtcaatggtagaaaaggaaatatcttcgtataaaaactagacagaatcattcccacaaactgcgttgtgatgtgttcgttcaactcacagagtttaacctttcttttcatagagcagttaggaaacaatctgtttgtcaattctgtaagtggatattctgacatcttgtggccttcgttggaaacgggatttcttcatattctgctagacagaagaattctcagtaacttccttctgttgtgtgtattcaactcacagagttgaacgatcctttacacagagcagacttgaaacactctttttgtggaatttgcaagtggagatttcagccgctttgaggtcaatggtagaaaaggaaactatcctcttataaagactagacagaatgattctcagaaaatcttttgtgatgtgtgcgttcaactcacagagtttaacttttcttctcatagagcagttaggaaacactctgtttgtaaagtgtgcaagtggatattcagacctctttgaggccttcgttggaaacgggatttcttcatattctgctagacagaagaattctcagtaacttccttgtgttgtgtgtattcaactgacagagttgaactttcatttagagagagcagatttgaaacactgtttttgtggaatttgcaattggagatttcaagtgctttggggccaaaggcagaaaaggaaatatcttcgtataaaaactagacagaatcattctcagaaactgctgcatgatgtgttcgttcaactctcagagtttaacttttcttttcattcagcggtttggaaacactctgtttgtaaagtctgcacgtggaaattttgaccacttagaggccttcgttggaaacgggattttttcatgtaaggctagacagaagaattcccagtaacttccttgtgttgtgtgcattcaactcacagagttgaacgttcccttagacagagcagatttgaaacactctatttgtgcaatttgcaagtgtaggtttcaagcgctttaaggtcaatggcagaaaaggaaatatcttcgtttcaaaactagacagaatcattcccacaaactgcgttgtgatgtgttcgttcaactcacagagtttaacctttctgttcatagagcagttaggaaacactctgtttgtaaagtctgaaagtggatattctgacatcttgtggccttcgtttgaaacgggatttcttcatattctgctagacagaagaattctcagtaacttccttgtgttgtgtgtattcaactcacagagttgaacgatcctttacacagagcagacttgaaacactctttttgtggaatttgcaagtggagatttcagcctctttgaggtcaatggtagaataggatatatcttcctatagaaactaggcagaatgattctcagaaacttctttgtgatgtgtgcgttcaactcacagagtttaacctttcttttcatagagcagttaggaaacactctgtttgtaaactctgcaagtggatactcagacctgtttgaggccttcgttggaaacgggatttcttcatactatgctagacagaagaattcgcagtaacttccttgtgttgtgtgtgttcaactcacagagttgaactttcatttacacagagcagatttgaaacactctttttgtggaatttgcaagtggagatttcaagcgctttgaggccaaaggcagaaaaggaaatatcttcgtttgaaaactagacagaatcattctcagaaactgctgcgtgatgtgtgcgttcaactctcagagtttaacttttcttttcattcagcggtttggaaatactctgtttgtaaagtctgcacgtggatattttgaccacttagaggccttcgttggaaacgggtttttttcatgtaaggctagacagaagaattcccagtaacttccttgtgttgtgtgcattcaactcacagagttgaacgttcccttagacagagcagatttgaaacactctatttgtgcaatttgcaagtgtagatttcaagcgctttaaggtcaatgacagaaaaggaaatatcttcgtttcaaaactagacagaatgattctcagaaactcctttgtgatgtgtgcgttcaactcacagagttttacctttctgttcatagagcagttaggaaaccctctgtttgtaaagtctgcaagtggatattcagacctccttgaggccttcgttggaaacgggatttcttcatattctgctagacagaagaattctcagtaacttccttgtgttgtgtgtattcaactcacagagttgaacgatcctttgcacagagcagacttgaaacactctttttgtggaatttgcaagtggagatttcagccgctttgaggtcaatagtagaaaaggaaatatcttcgtagaaaaactagacagaatgattctcagaaactcccttgtgatgtgtgcgttcaactcacagagtttaacctttcttttcatagagcagttaggaaacactctgtttgtaaagtctgcaagtggatattcagacttccttgaggccttcgttggaaacgggatttcttcatattatgctagacagaagaattcccagtaacttccttgtgttgtgtgtgttcaactcacagagttgaactttcatttacacagaacagatttgaaacactctttttgtggaatttgcaaatggagatttcaagcgctttgaggccaaaggcagaaaaggaaatatcttcgtataaaaactagacagaatcattctcagaaactgctctgcgatgtgtgcgttcaactctcagagtttaacttttcttttcattcagcagtttggaaacactctgtttgtaaagtctgcacgtggatattttgaccacttagaggccttcgttggaaacgggttttttcctgtaaggctagacagaagaattctcagtaacttccttgtgttgtgtgtattcaactcacagagttgaacgttcccttagacagagcagatttgaaacactctatttgtgcaatttgcaagtgtagatttcaagcgctttaaggtcaatggcagaaaaggaaatatcttcgtttcaaaactagacagaatcattcccacaaactgcgttgtgatgtgttcgttcaactcacagagtttaacctttctgttcatagagcagttaggaaatactctgtttgtaaagtctgtaagtggatattctgacatcttgtggccttcgttggaaacgggatttcttcatattctgctagacagaagaattctcagtaacttccttgtgttgtgtgtattcaactcacagagttgaacgatcctttacacagagcagacttgaaacactctttttgtggaatttgcaagtggagatttcagccgctttgagttcaatggtagaaaaggaaatatcttcctatagaaactagacagaacgattctcagaaactcctttgtgatgtgtgcgttcaactcacagagtttaacctttcttttcatagagcagttaggaaacactctgtttgtaaagtctgcaagtggatattcagacctctttgaggctttcgttggaaacgggatttcttcctattctgctagacagaagaattcccagtaacttccttgtgttgtgtgtgttcaactcacagagttgaactttcatttacacagagcagatttgaaacactctttttgtggaatttgcaagtggagatttcaagcgctttgaggccaaaggcagaaaaggaaatatcgtcgtttcaaaactagacagaatgattctcagaaactcctttgtgatgtgtgcgttcaagtcacagagtttaacctttcttttcatagagcagttaggaaacactctgtttgtaaagtctgcaagtggatattcagacctctttgaggccttcgttggaaacgggtttttttcatataagggtagacagaagaattcccagtaacttccttgtgttgtgtacattcaactcacagagttgaacgttcccttagacagagcagatttgaaacactctttttgtgcaattggcaagtggtgatttcagccgatttgaggtcaattgtagaaaaggaaatatcttcgtagaaaaactagacagaatcattcccacaaactgcgttgtgatgtgttcgtccaactcacagagtttaacttttcttttcatagagcagttaggaaacagtctgtttgtaaagtctgtaagtggatattctgacctcttgtggccttcgttggaaacgggatttcttcatattctgctagacagaagaattctcagaaacttccttgtgttgtgtgttttcaactcacagagttgaacgatgctttacacagagtagacttgaaacactcttgttgtggaatttgcaagtggagatttcagcctctttgaggtcaatggtagaataggaaatatcttcctatagaaactagacagaacgattctcagaaactcctttgtaatgtgtgcgttcaactcacagagtttaacctttcttttcatagagcagttaggaaacactctgtttgtaaagtctgcaagtggatattcagacctctttgaggccttcgttggaaacgggatttcttcatattctgctagacagaagaatttccagtaacttccttgtgttgtgtgtgttcaactcacagagttgaactttcatttacacagagcagatttgaaacactctttttgtggaatttgcaaatggagatttcaagcgctttgaggccaaaggcagaaaaggaaatatcttcgtttcaaaactagacagaatcattctcagaaactgctgcgtgatgtgtgcgttcaactctcagagtttaacttttcttttcattcagcggtttggaaacactctgtttgtaaagtctgcacgtggatattttgaccacttagaggccttcgttggaaatgggattttttcatgtaaggctagacagaagaattcccagtaacttccttgtgttgtgtgcattcaactcacagagttgaacgttcccttagacagagcagatttgaaacactccatttgtgcaatttgcaagggtagatttcaagcgctttaaggtcaatggcagaaaaggaaatatcttcgtttcaaaactagacagaatcattcccacaaactgcgttgtgatgtgttcgttcaactcacagagtttaacctttctgttcatagagcagttaggaaacactctgtttgtaaagtctgtaagtggatattctgacatcttgtggccttcgttggaaatgggatttcttcatattctcctagacagaacaattctcagtaacttccttgtgttgtgtgtattcaactcacagagttgaacgatcctttacacagagcagtcttgaaacactctttttgtggaatttgcaagtggagatttctgccgctttgaggtcaatggtagaataggaaatatcttcctatagaaactagacagaatgattctcagaaactcctttgagatgtgtgtgttcaactcacagagtttaacatttcttttcatagagcagttaggaatcactctgtttgtaaagtctgcaagtggatattcagacctctttgaggccttcgttggaaacgggtttttttcatataaggctagacagaagaattcccagtaacttccttgtgttgtgtgtgttcaactcacagagttgaactttcatttacacagagcagatttgaaacactctttttgtggaatttgcaaatggagatttcaagcgctttgaggccaaagcagaaaaggaaatatcttcgtataaaaactagacagaatcattttcagaaactgctctgcgatgtgtgcgttcaactctcagagtttaacttttcttttcattcaggagtttggaaacactctgtttgtaaagtctgcacgtggataacttgaccacttagaggccttcgttggaaacgggtttttttcatgtaaggctagacagaagaattcccggtaacttccttgtgttgtgtacattcaactcacagagttgaacgttcccttagacagagcagatttgaaacactctttttgtgcaattggcaagtggagatttcaagcgctttaaggtcaatggcagaaaaggaaatatcttcgtttcaaaactcttcagaaagattctcataaactcctttgtgatgtgtgcgttcaactcacagagtttaacctttcttttcatagagcagttaggaaacactctgtttgtaaagtctgcaagtggatattcagacctctttgaggccttcgttggaaacgggatttcttcatattatgctagacagaataattctcagtaacttccttgtgttgtgtgtattcaactcacatagttgaaggatcctttacagagagcaggcttgaaacactctttttgtcgaatttgcaagtggagatttcagccgctttgaggtcaatggtagaataggaaatatcgtcttatagaaactagacagaatgattctcagaaactcctttgtgatgtgtgcgttcaactcacagagtttaacctttcttttcatagagcagttaggaaacactctgcttgtaaagtctgcaagtggatattcagacctctttgaggccttcgttggaaacgggtttttttcatataaggctagacagaagaattcccagtaacttccttgtgttgtgtgtgttcaactcacagagttgaactttcatttacacagagcagatttgaaacactctttttgtggaacttgcaaatggaggtttcaagcgctttgaggccaaaggcagaaaaggaaatatcttcgtataaaaaatagacagaatcattctcagaaactgctctgcgatgtgtgcgttcaactctcacagtttaacttttcttttcattcagcagtttggaaacactctgtttgtaaagtctgcaagtggatattttgaccacttagaggccttcgttggaaacgggtttttttcctgtaaggctagacagaagaattcccagtaacctccttgtgttgtgtacattcaactcacagagttgaacgttcccttagacagagcagatttgaaacactctttttgtgcaattggcaaatggagatttcaagcgctttaaggtcaatggcaggaaaggaaatatcttcgtttcaaaactagacagaatcattcccacaaactgcgttgtgatgtgttcgttcaactcacagagtttaacctttcttttcatagagcagttaggaaacagtctgtttgtcaattctgtaagtggatattctgacatcttgtggccttcgttggaaacgggacttcttcatattctcctagacagaataattctcagtaacttccttgtgttgtgtgtattcaactcacagagttgaaggatcctttacagagagcagacttgaaacactctttttgtggaatttgcaagtggagatttcagccgtttgaggtcaatggtagaataggaaatatcttccaatagaaactagacagaatgattctcagaaactcctttgtgatgtgtgtgttcaactcacagagtttaacctttcttttcatagagcagttaggaaacactctgtttgtaaagtctgcaagtggatattcagacctctttgaggccttcggttggaaacgggtttttttcatataaggctagacagaagaattcccagtaacttccttgtgttgtgtgtgttcaactcacagagttgaactttcatttacacagagcagatttgaaacactctttttgtggaatttgcaagtggagatttcaagcccttagaggccaaaggcagaaaaggaaatatcttcgtttgaaaactagacagaatcattctcagaaactgctctgtgatgtgtgcgttcaactctcagagtttaacttttcttttcattcagcagtttggaaacactctgtttgtaaagtctgcacgtggataatttgaccacttagaggccttcgttggaaacgggtttttttcatgtaaggctagacagaagaattcccagtaacttccttgtgttgtgtacattcaactcagagagttgaacgttcccttagacagagcagatttgaaacactctttttgtgcaattggcaagtggagatttcaagcgctttgaggtcaacggcagaaaaggaaatatcttcgtttcaaaactagacagcatcattcccacaaactgcgttgtgatgtgttcgttcaactcacagagtttaacctttgttttcatagaggagttaggaaacagtctgtttgtaaattctgtaagtggatattctgacatcttgtggccttcgttggaaacgggatttcttcatattctgctagacagaagaattctcagtaacttccttgtgttgtgtgtattcaactcacagagttgaacgatcctttacacagagcagactggtaacactctttttgtggaatttgcaagtggagatttcagccgctttgaagtcgaaggtagaaaaggaaataacttcctataaaaactagacagaatgattctcaaaaaatcctttgtgatgtgtgcgttcaactcacagagtttaacttttcttttcatagagcagttaggaaacactctgtttgtaaagtctgcaagtggatattcagacctctttgaggccttcgttggaaacgggaatttttcatattctgctagacagaagaattctcagtaacttccttctgttgtgtgtattcaactcacagagttgaacgatcctttacagagagcagacttgaaacactctttttgtggaatttgcaagtggagatttcagccgctttgaggtcaatggtagaataggaaatatcttcctatagaaactagacagaatgattctgagaaactcctttgtgatgtgtgcgttcaactcacagagtttaacctttcttttcatagagcagttagtagacactctgtttgtaaagtctgcaagtggatattcagatctctttgaggccttcgttggaaacgggatttcttcatattatgctagacagaagaattcccagtaacttccttgtgttgtgtgtgttcgactcacagagttgaactttcatttacacagagcagatttgaaacactctttttgtggaatttgcaagtggagatttcaagcgctttgaggccaaaggcagaaaaggaaatatcttcgtttcaaaactagacagaatcattctcagaaactgctctgcaatgtgtgcgttcaactctcagagtttaacttttcttttcattcagcagtttggaaacactctgtttgtaaagtctgcacgtggatattttgaccacttagaggccttcgttggaaacgggtttttttcctgtaaggctaaacagaagaattcccagtaacttccttgtgttgtgtacattcaactcacagtgttgaacgttcccttagacagagcagatttgaaacactctttttgtgcaattggcaagtggagatttcaagcgctttaaggtcaatggcagaaaaggaaatatcttcgtttcaaaactagacagaatcattcccacaaactgcgttgtgaagtgctcgttcaactcacagattttaacctttctgttcatagagcagttaggaaacactctgtttgtaaagtctgtaagtggatattctgacatcttgcggccttcgttggaaacggaatttcttcatattctgctagacagaagaattctcagtaacttccttgtgttgtgtgtattcaactcacagagatgaacgatcctttacacagagcagacttgaaacactctttttgtggaatttgcaagtggagatttcagccgctttgagttcaatggtagaataggaaatatcttcctatagaaactagacagaatgattctcagaaactcctttgtgatgtgtgcgttcaactcacagagtttaacctttcttttcatagagcagttaggaaacactctgtttataaagtctgcaggtggatattcagacctctttcaggccttcgttggaaacgggtttttttcatgtaaggctagacagaagaattcccagtaacttccttgtgttgtgtgtgtccaactcacagagttgaactttcatttacacagagcagacttgaaacactctttttgtggaatttgcaagtggagatttcaagcgctttgaggccaaaggcagaaaaggaaatatcttcgtttcaaaactagacagaatcattctcagaaactgctctgtgatgtgtgcgttcacctctcagagtttaagttttcttttcattcagcagtttggaaacactctgtttgtaaagtctgcacgtggatattttgaccacttagaggccttcgttggaaacgggtttttttcatgtaagaccagacagaagaattcccagtaacttccttttgttgtgtgcattcaactcacagagatgaacattcccttagacagagcagatttgaaacactctatttgtgtaatttgcaagtgtagatttcaagcgctttaaggtcaatggcagaaaaggaaatatcttcgtttcaaaactagacagaatcattcccacaaactgcgttgtgatgtgttcgttcaactcacagagtttaacctttctgttcatagagcagttaggaaacactctgtttgtaaagtctgtaagtggatattctgacatcttgtggccttcgttggaaacggtatttcttcatattctgctagacagaagaattctcagaatcttccttgtgttgtgtgtattcaactcacagagttgaacgatcctttacacagagcagacttgaaacactctttttgtggaatttgcaagtggagatttcagcagctttgaggtccatggtagaaaaggaaatatcttcgtataaaaactagacagaatgattctcagaaactcctttgtgatgtgtgtgttcaactcacagagtttaacctttcttttcatagagcagttagtaaacactctgtttataaagtctgcaagtggatattcagacccctttgaggccttcgttggaaacggaatttcttcatattatgctagacagaagaattctcagtaacttccttgtgttgtgtgtattcaactcacagagttgaacgatcctttacacagagcagacttgaaacactctttttgtggaatttgcaattggagatttcagccgctttgagttcaatggtagaataggaaatatcttcctatagaaactagacagaatgattctcagaaactcctttgtgatgtgtgcgttcaactcacagagttcaacctttcttttcatagagccgttgggaaacactctgtttgtaaagtctgcaagtggatattcagacctctttgaggccttcgttggaagcgggatttcttcatattcttctagacagaagaattcccagtaacttccttgtgttgtgtgtgttcaactgacagagttgaactttcatttacacagagcagatttgaaacactctttttgtggaatttgcaagtggagatttcaagcgctttgaggccaaaggcagaaaaggaaatatcttcgtataaaaactagacagaatcattctcagaagctgctctgcgatgtgtgtgttcaactctcagagtttaacttttcttttcattcagcagtttggaaacactctgtttgtaaagtctgcacgtggataatttgaccacttagaggccttcgttggaaacgggtttttttcatgtaaggttagacagaagaattcccagtaacttccttgtgttgtgtgcattcaactcacagagttgaacgatcctttacacagagcagacttgaaacactctttttgtggaatttgcaagtggagatttcagccgctttgaggtcaatggtagaataggaaatatcttcctatagaaactagacagaatcattcccacaaactgcgttgtgatgtgttcgttcatctcacagagtttaacctttcttttcatagagcagttaggaaacactctgtttgtaaattctgtaagtggatattctgacatcttgtggccttcgttggaaacgggatttcttcatactgtgctagacagaagaattctcagtaacttccttgtgttgtgtttattcaactcacagagttgaatgatcctttacacagagcagacttgaaacactctttttgtggaatctgcaagtggagatttcagccgctttgaggtcaatggtagaaaaggaaatatcttcgtataaagactagacagaacgattctcagaaactcctttgtgatgtgtgcgtacaactcacagagtttaacctttcttttcatagagcagttaggaaacactctgtttgtaaagtctgcaagtggatattcagacctctttgaggccttcgttggaaacgggatttcttcatattctgctagacagaagaattctcagtaacttccttgtgttgtgtgtattcaactcacagagttgtacgatcctttacacagagcagacttgaaacactctttttgtggaatttgcaagtggagatttcagccgctttgaggtcaatagtagaaaaggaaatatcttcgtagaaaaactatacagaatcattcccacaaactgcgttgtgatgtgttcgttcaactcacagagtttaacctttgtgttcatagagcagttaggaaacactctgtttgtaaagtctgtaagtggatattctgacatcttgtggccttcgttggaaaccggatttcttcatattctgctagacagaagaattctcagtaacttccttgtgttgtgtgtattaaactcacagggttgaacgatcctttaaacagagcagacttgaaacactctttttgtggaatttgcaagtggagatttcagccgctttgaggtcaatggtagaataggaaatatcttcctatagaaactagacagaatgattctcagaaactcctttgtgatgtgtgcgttcaacacacagagtttaacctttcttttcatagaggagttagtaaacactctgtttataaagtctgcaagtggatattcagacccctttgaggccttcgttggaaacgggatttcttcatattctgctagacagaagaattctcagtaactttccttgtgttgtgtgtattcaactgacaaagttgaactttcatttagagggagcagatttgaaacactgtttttgtggaatttgcaagtggagatttcaagcgctttggggccaaaggcagaaaaggatatatcttcgtataaaaactagacagaatcattttcagaaactgctgcgtgatgtgtgcgttcaactctcagagtttaacttttcttttcattcagcggtttggaaacactctgtttgtaaagtctgcacgtggatattttgaccacttagaggccttcgttggaaacgggtttttttcatgtaaggctagacagaagaattcccagtaacttccttgtgttgagtgcattcaactcacagagttgaacgttcccttagacagagcagatttgaaacactctatttgtgtaatttgcaagtgtagatttcaagcgctttaaggtcaatggcagaaaaggaaatatcttcgtttcaaaactagacagaatgattctcagaaactcctttgtgatgtgtgcgttcaactcacagagtttaacctttctgttcatagagcagttaggaaacactctgtttgtaaagtctgtaagtggatattctgacatcttgtggccttcgttggaaacgggatttctgcatattctgctagacagaaaaattctcagtaacttccttgtgttgtgtgtattcaactcacagagttgaacgatcctttacacagagcagacttgtaacactctttttgtggaatttgcaagtggagatttcagccgctttgaagtcaaaggtagaaaaggaaatatcttcctataaaaactagacagaatgattctcagaaactcctttgtgatgagtgtgttcaactcacagagtttaacctttcttttcatagagcagttaggaaacactctgtttgtaaagtctgcaagtggatattcagacctctttgaggccttcgttggaaacgggtttttttcatataaggctagacagaaggattcccagtaacttccttgtgttgtgtgtgttcaactcacacagttgaactttcatttacaaagagcagatttgaaacactctttttgtggaatttgcaagtggagatttcaagcgctttgaggccaaaggcagaaaaggaaatatcttcgtataaaaactagacagaatcattctcagaaactgctctgcgatgtgtgcgttcaactctcagagtttaacttttcttttcattcagtagtttggaaacactctgtttctaaagtctgcacgtggataatttgaccacttagaggccttcgttggaaacgggtttttttcatgtaaggctagacagaagaattcccagtaacttccttgtgttgtgtgcattcaactcacagagttgaacgttcccttagagcagatttgaaacactctatttgtgcaatttgcaagtgtagatttcaagcgctttaaggtcaatggcagaaaaggaaatatcttcgtttcaaaactagacagaatcattccgacaaactgcgttgtgatgtgttcgttgaactcacagagtttaacctttctgttcatagagcagttaggaaacactctgtttgtaaagtctgtaagtggatattctgacatcttgtggccttcgttggaaacgggatttcttcatattctgctggacagaataattctcagtaagtcccttgtgttgtgtgtattcaactcacagagttgaacgatcctttacacagagcagacttgaaacattctttttgtggaatttgcaactggagatttcagccgctttgaggtcaatggtagaataggaaatatcttcctatagaaactagacagaatgattctcagaaacttctttgggatgtgtgccttcaactcacagagtttaacctttcttttcatagagcagttaggaaacactctgtttgtaaagtctgcaagtggatattcagacctctttgaggccttcgttggaaacgggtttttttcatataaggctagacagaagaattcccagtaacttccttgtgatgtgtgtgttcaactcacagagttgaactttcatttacacagagcacatttgaaacactctttttgtggaatttgcaagtggagatttcaagcgctttgaggccaaaggcagaaaaggaaatatcttcgtataaaaactagacagaatcattctcagaaactgctctgcgatgtgtgcgttcaactctcagagtttaacttttcttttcattcagaagtttggaaacactctgtttgtaaagtctgcacgtggataacttgaccacttagaggccttcgttggaaacgggtttttttcatgtaaggctagacagaagaattcccagtaacttccttgtgttgtgtgcattcaactcacagagttgaacgttcccttagacagagcagatttgaaacactctatttgtgcaatttgcaagtgtagatttcaagcgctttaaggtcaatgacagaaaaggaaatatcttcgtttcaaaactagacagaatgattctcagaaactcctttgtgatgtgtgcgttcaactcacagagttctacctttcttttcatagagcagttgggaaacactctgtttgtaaagtctgcaagtggatattcagacttctttgaggccttcgttggaagcgggatttcttcatattctgctagacagaagaattctcagtaacttccttgtgttgtgtgtattcaactcacagagttgaacgatcctttacacagaacagtcttgaaacactctttttgtggaatttgcaagtggagatttcagccgctttgaggtcaatggtagaataggaaatatcttcctatagaaactagacagaataattctcagaaactgctttgtgatgtgtgcgttcaactcacagagtttaaactttcttttcatagagcagttaggaaacactctgtttataaagtcggcaagtggatattcagacctctttgaggccttcgttggaaacgggatttcttcatattctgctagacagaaaaattctcagtaacttccttgtgttgtgtgtattcaactcacagagttgaacgatcgtttacacagagcagacttgaaacactctttttgtggaatttgcaaggggagatttcagccgctttgaggtcaatagtagaaaaggaagtatcttcatatagaaattatacagaatgattctcagaaactcctttgagctgtgtgcgttcaactcacagagtttaacctttcttttcatagagcagttaggaaacactctgtttgtaaagtctgcaagtggatattcagacatctttgaggctttcgttggaaacgggatttcttcatattctgctagacagaagaattctcagtaacttccttgtgttgtgtgtattcaactcacagagttgaacgatcctttacacagagcggacttgaaacactctttttgtggaatttgcaagtggagatttcagccgcgttgaggtcaatggtataaaaggaaatatcttcgtataaaaactagacagaataattctcagaaactcctttgtgatgtgtgtgttcaactcacagagtttaacctttcttttcatagagcagttagtaaacactctgtttataaagtctgcaagtggatattcagacccctttgaggccttcgttggaaacgggatttcttcatattatgctagacagaagaattcccagtaacttccttgtgttgtgtgtgttcaactcacagagttgaacgttcatttacacagagcagatttgaaacactctttttgtggaatttgcaagtggagatttcaagcgctttgaggccaaaggcagaaaaggaaatatctccgtttcaaaactagacagaatcattctcagaaactgctctgtgatgtgtgcgttcaactctcagagtttaacttttcttttcattcagcagtttggaaacactctgtttgtaaagtctacacgtggatattttgaccacttagagaccttcgttggaaacgggtttttttcatgtaaggctagacagaagaattcccagtaacttccttgtgttgtgtgcattcaactcacagagatgaacgttcccttagacagagcagatttgaaacactctatttgtgcaatttgcaagtgtagatttcaagcactttaaggtcaatggcagaaaaggaaatatcttcgtttcaaaactagacagaatcattcccacaaactgcgttgggatgtgctcgttcaactcacagagtttaaactttctgttcatagagcagttaggaaacactctgtttgtaaagtctgtaagtggatattctgacatcttgtggccttcgttggaaacgggatttcttcatattctgctagacagaagaattctcagtaacttccttgtgttgtgtgtattcaactcacagagttgaacgatcctttacacagagcagacatgtaacactctttttgtggaatttgtaagtggagatttcagccgcgttgaggtcaatggtagaaaaggaaatatcttcgtataaaaactagacagaatgattctcagaaacttcattgtgatgtgtgcgttcaactcacagagtttaacctttcttttcatagagaagttaggaaacactctgtttgtaaactctgcaagtggatattcagacctctttgaggccttcgttggaaacgggatttcttcatactgtgctagacagaataattctcagtaacttccttgtgttgtgtgtattcaactcacagagttgaaagatcctttacagagagcaggcttgaaacactctttttgtcgaatttgcaagtggagatttctgccgctttgaggtcaatggtagaataggaaatatcttcttatagaaactagacagaatgattctcagaaactcctttgtgatgtgtgtgttcaactcacagagtttaacctttcttttcatagagcagttaggaaacactctgtttgtaatgtctgcaagtggatattgagacctctttgaggccttcgttggaaacgggtttttttcatataaggctagacagaagaattcccagtaacttccttgtgttgtgtacattcaactcacagagttgaacgttcccttagacagagcagatttgaaacactctttttgtgcaattggcaagtggagatttcaagcgctttaaggtcaacggcagaaaaggaaatatcttcgtttcaaaactagacagaatcattcccacaaactgcgttgtgatgtgttcgttcaactcacagagtttaacctttctgttcatagagcagttaggaaacactctctttgtaaagtctgtaagtggatattctgacatcttgtggccttcgttggaaacgggatttcttcatattctgctagacagaagaattctcagtaacttccttgtgttgtgtgtattcaactcacagagttgaacgatcctttacacagagcagacttgaaacattctttttgtggaatttgcaagtggagatttcagccgctttgaggtcaatggtagaataggaaatatcttcctatagaaactagacaggaacgattctcagaaactcctttgtgatgtgtgcgttcaactcacagagtttaacctttcttttcatagagcagttaggaaacactctgtttgtaatgtctgcaagtggattttcagacctccttgaggccttcgttggaaacgggatttcttcctattctgctagacagaagaattctcagaaacttccttgtgtagtgtatattcaactcacagagttgaacgatcctttacacagagcagacttgaaacactctttttgtggattttgcaagtggagatttcaagcgcttttggggccaaaggcagaaaaggaaatatcttcatataaaaactagacagaatcattctcagaaactgctctgtgatgtgtgcgttcaactctcagagtttaacttttcttttcattcagcagtttggaaacactctgtttgtaaagtctgcacgtggatattttgaccacttagaggccttcgttggaaacgggttttcttcatgtaaggctagacagaagaattcccagtaacttccttgtgttgtgtgcattcaactcacagagttgaacgttcccttagacggagcagatttgaaacactctatttgtgcaatttgcaagtgtagatttcaagcgctttaaggtcaatggcagaaaaggaaatatcttcgtttcaaaactagagagaatcattcccacaaactgcgttgtgatgtgttcgtacaactcacagagtttaacctttctgttcatagagcagttaggaaacactctgtttgtaaagtctgtaagtggatattcagacatcttgtggccttcgttggaaacgggatttcttcatattctgctagacagaagaattctcagtaacttccttgtgttgtgtttattcaactcacagagttgaatgatcctttacgcagagcagacttgaaacactctttttgtggaatttgcaagtggagatttcagccgctttgaggtcaatggtagaaaagtaaatatcttcgtataaagactagacagaatgattctcagaaactcctttgtgatgtgtgcattcaactcacagagtttaacctttctgttcatagagcagttaggaaacactctgtttgtaaagtctgcaagtggatattcagacctccttgaggccttcgttggaaacgggatttcttcatattctgctagacagaagaattcccagtaacttccttgtgttgtgtgtgttcaactcacagagttgaactttcatttacacagagcagatttgaaacactctttttgtggaatatgcaagtggagatttcaagcgcttttaggccaaaggcagaaaaggaaatatcttcgtttcaaaactagacagaatgattctcagaaactgctctgcgatgtgtgcgttcaactctcagagtgtaacttttcttttcattcagcagtttggaaacactctgtttgtaaagtctgcacgtggatattttgaccacttagaggccttcgttggaaacgggtttttttcctgtaaggctagacagaagaattcccagtaacttccttgtgttgtgtacattcaactcacagagttgaacgttcccttagacagagcagatttgaaacactctttttgtgcaattggcaaatggagatttcaagcgctttaagttcaatggcagaaaaggaaatatcttcgtttcaaaactggacagaatcattcccacaaactgcgttgtgatgtgttcgttcaactcacagagtttaacctttcttttcatagagcagttaggaaacagtctgtttgtcaattctgtaagtggatgttctgacatcttgtggccttcgttggaaacgggatttcttcatattctgctagacagaagaattctcagtaacttccttgtgttgtgtgtatttaactcacagagttgaacgatcctttacacagagcagacttgaaacactctttttgtggaatttgcaagtggagatttcagccgctttgaggtcaatggtagaataggaaatatcttcgtataaaaactagacagaatgattctcagaaactcctttgtgatgtgtgcgttcaactcacagagtttaacctttcttttcatagagcagttaggaaacactctgtttgtaaagtctgcaagtggatattcagacctccttgaggccttcgttggaaacgggatttctacatattatgctagacagaagaattctcagtaacttccttgtgttgtgtgtattcaactcacagagttgaacgatcctttacacagagcagacttgaaacactctttttgtggaatttgcaagtggagatttctgcctctttgaggtcaatggtagaatacgaaatatcttcctatagaaactagacagaatcattctcagaaactgctgcatgatgcgtgcgttcaactctcaaagtttaacttttcttttcattcagcggtttggaaacactctgtttgtaaagtctgcacgtggatattttgaccacttagaggccttcgttggaaacgggtttttttcatgtaaggctagacagaagaattcccagtaatttccttgtgttgtgtgcattcaactcacagagttgaacgttcccttagacagagcagatttgaaacactctatttgtgcaatttgcaagtgtagatttcaagcgctttaaggtcaatggcagaaaaggaaatatcttcgtttcaaaactagacagaatcattcccacaaactgcgttgtgatgtgttcgttcaactcacagagtttaacctttctgttcatagagcagttaggaaacactctgtttgtaaagcctgtaagtggatattctgacatcttgtggccttcgttggaaacgggatttcttcatattctgctagacagaagaattctcagtaacttccttgtgttgtgtgtattcaactcacagagttgaacgatcctttacacagagcagacttgaaacactctttttgtgtaatttgcaagtggagatttcagacgatttgaggtcaatggtagaaaaggaaatatcttcgtataaagactagacagaatgattctcagaaactcctttgtgatgtgtgtgttcaactcacaaagtttaacctttcttttcatagagcagttaggaaacactctgtttgtaaagtctgcaagtggatattcagacctctttgaggccttcgttggaaacgggtttttttcatataaggctagacagaagaattcccagtaacttccttgtgttgtgtgtgttcaactcacagagttgaactttcatttacacagagcagatttgaaacactctttttgtggaatttgcaaatggagatttcaagcgctttgaggtcaaaggcagaaaaggaaatatcttcgtataaaaactagacagaatgattctcagaaactgctctgcgatgtgtgcgttcaactctcagagtgtatcttttcttttcattcagcagtttggaaacactctgtttataaagtctgcacgtggatattttgaccacttagaggccttcgttggaaacgggattttttcatgtaaggctagaccgaagaattcccagtaacttccttgtgttgtgtgcattcaactcacagagttgaacgttcccttagacagagcagatttgaaacactctatttgtgcaatttgcaagtgtagatttcaagcgctttaaggtcaatggcagaaaagggaatatcttcgtttcaaaactagacagaatcattcccacaaactgcgttgtgatgtgttcgttcaactcacagagtttaacctttctgttcatagagcagttaggaaacactctgtttgtaaagtctgtaagtggatattctgacctcttgtggccttcgttggaaacgggatttcttcatattctgctagacagaagaattctaagtaacttccttgtgttgtgtgtattcaactcacagagttgaacgatcctttacagagagcagacttgaaacactctttttgtggaatttgcaagtggagatttcagccgctttgaggtcaatggtagaataggaaatatcttcctatagaaactagacagaatgattctcagaaacttcattgtgatgtgtgcgttcaactcacagagtttaacctttcttttcatagagcagttaggaaacactctgtttgtaaactctgcaagtggatattcagacctctttgaggccttcgttggaaacgggatttcttcatactgtgctagacagaagaattctcagtaacttccttgtgttgtgtgtattcaactcacagagttgaacgatcctttacacagagcagacttgtaacactctttttgtggaatttgcaagtggagatttcagccgctttgaatcaaaggtagaaaaggaaatatcttcctataaaaactagacagaatgattctcagaaactccttcgtgatgtgtgcgttcaactcacagagtttaacctttcttttcatagagcagttaggaaacactctgtttgtaaagtctgcaagtggatattgagacatctttgaggccttcgttggaaacgggatttcttcatgttctgctagacagaagaattcccagtaacttccttgtgttgtgtgcattcaactcacagagttgaacgttcccttagacagagcagatttgaaacactctatttgtgcaatttgcaagtgtagatgtcaagcgctttaaggtcaatggcagaaaaggaaatatcttcgtttcaaaactagacagaatcattcccacaaactgcgttgtgatgtgttcgttcaactcacagagtttaacctttctgttcatagagcagttaggaaacactctatttctaaagtctgtaagtggatattctgacatcttgtggccttcgttggaaacgggatttcttcatattctgctagacagaagaattctcagtaacttccttgtgttgtgtgtattcaactcacagagttgaacgatcctttacacagagcagacttgaaacattctttttgtggaatttgcaagtggagatttcagccgctttcaggtcaatggtagaataggaaatatcttcatatagaaactagacagaatgattctcagaaactcctttgtgatgtgtgcgttcaactcacagagtttaacctttcttttcatagagcagttgggaaacactctgtttgtaaagtctgcaagtggatattcagacctccttgaggccttcgttggaaacgggatttcttcatataatgctagacagaagaattctcagtaacttccttgtgttgtgtgtattcaactcacagagttgaacgatcctttacacagagcacacttgaaacactctttttgtggaatttgcaagtggagatttcagccgctttgaggtcaatagtagaaaaggaaatatcttcgtagaaaaactagacagaatcattctcagaaactgctgcgtgatgtgtgcgttcaactctcagagtttaacttttcttttcattcagcggtttggaaacactctgtttgtaaagtctgcacgtggatattttgaccacttagaggccttctttggaaacgggttttcttcatgtaaggctagacagaagaattcccagtaacttccttgtgttgtgtgcattcaactcacagagttgaacgttcctttagacagagcagatttgaaacactctatttgtgcaatttgcaagtgtagatttcaagcgctttaaggtcaacggcagaaaaggaaatatcttcgtttcaaaactagacagaatcattcccacaaactgcgttgtgatatgttcgttcaactcacagagtttaacctttctgttcatagagcagttaggaaacactgtgtttgtaaagtctgtaagtggatattctgacatcttgtggccttcgttggaaacgggatttcttcatattgtgctagacagaagaattctcagtaacttccttgtgttgtgtgtattcaacacacagagttgaacgatcctttacacagagcagacttgaaacactctttttgtggaatttgcaagtggagatttcagccgctttgatgtcaatggtagaaaaggaaatatcttcgtataaagactagacagaatgattctcagaaactcctttgtgatgtgtgcgttcaactcacagagtttaacctttcttttcatagagcagttaggaaacactctgtttgtaaagtctgcaagtggatattcagacctctttgaggccttcgttggaaacaggtttttttcctataaggctagacagaagaattcccagtaacatccttgtgttgtgtgtgttcaactcacagagttgaactttcatttacacagatcagatttgaaagactctttttgtggaatttgcaaatggagatttcaagcgctttgaggccaaaggcagaaaaggaaatatcttcgtttcaaaactagacagaatcattccaagaaactgctctgcgatgtgtgcgttcaactctcagagtttaaatttgcttttcattcagcagtttggaaacactctgtttgtaaagtctgcacgtggataatttgaccacttagaggccttcgttggaaacgggtttttttcatgtaaggctagacagaagaattctcagtaacttccttgtgttgtgtgtattcaactcacacagttgaacgatcctttacacagagcagacttggaacactctttttgtggaatttgcaagtggagatttcagccgctttgaagtcaaaggtagaaaaggaaatatcttcctataaaaactagacagaatcattcccacaaactgcgttgtgatggtgttcgttcaactcacagagtttaacctttcttttcatagagcagttaggaaacagtctgtttggtaaattctgtaaggggatattctgacatcttgtggccttcgttggaaacgggatttcttcatattctgctagacagaacaattctcagtaacttccttgtgttgtgtgtattcaactcacagagttgaacgatcctttacacagagcagacttgaaacactctttttgtggaatttgcaagtggagatttcagccgctttgaggtcaatagtagaaaaggaaatgtcttcgtagaaaaactagacagaatgattctcagaaactcctttgtggtgtgtgcgttcaactcacagagtttaacctttcttttcatagagcagttaggaaacactctgtttgtaaagtctgcaagtggatattcagacctctttgaggccttcgttggaaacgggattttttcatataaggctagacagaataattctcagtaacttccttgtgttgtgtgtattcaactgagagagttgaacgttcatttagagagagcagatttgaaacactgtttttgtggaatttgcaattggagatttcaagcgctttagggccaaaggcagaaaaggaaatatcttcgtataaaaactagacagaatcattctcagaaactgctgcgtgatgtctgcgttcaactctcagagtttaacttttcttttcattcagcggtttggaaacactctctttgtaaagtctgcacgtggatattttgacctcttagaggccttcgttggaaacgggttttcttcatgtaaggctagacagaagaattcccagtaacttccttgtgttgtgtacattcaactcacagagttgaacgttcccttagacagagcagatttgaaagactctttttctgcaattggcaaatggagatttcaagcgctttaaggtcaatggcagaaaaggaaatatcttcgtttcaaaactagacagaatcattcccacaaactgcgttgtgatgtgttcgttcatctcacagagtttaacctttcttttcatagagcagttaggaaacagtctgtttgtaaattctgtaagtggatattctgacatcttgtggccttcgttggaaacgggatttcttcatattctgctagacagaagaattctcagaaacttcgttgtgttgtgtgttttcaactcacagagttgaacgatcctttacacagagtagacttgaaaaactctttttgtagaatttgcaagtggagatttcagccgctttgaggtcaatggtagaaaaggaaatatcttcgtataaaaactagacagaatgattctcagaaactcctttgtgatgtgtgcgttcaactcacagagttcaacctttcttttcatagagcagttgggaaacactctgtttgtaaattctgcaaatgcatattcagacttctttgaggccttcgttggaagcgggatttcttcatattctgctagacagaagaattctcagaaacttcgatgtgttgtgtgttttcaaatcacagagttcaacgatcctttacacagagtagacttgaaacactctttttgtggaattggcagggtggagatttcagccgctttgaggtcaatggtagaaaaagaaatatcttcgtataaaaactagacagaatgattctcagaaactcctttgtgatgtgtgcgttcaacgcacagagttcaacctttcttttcatagagcagttgggaaacactctgtttgtaaagtctgcaagtggatattcagacttctttgaggccttcgttggaagcgggatttcttcatattcaactagacagaagaattcccagtaacttccttgtgttgtgtacattcaactcacagagttgaacgttcccttagacagagcagatttgaaacactctttttgtgcaattggcaaatggagatttcaagcgatttaaggtcaatggcagaaaaggaaatatcttcgtttcaaaactagacagaatgattctcagaaacttcattgtgatgtgtgcgttcaactcacagagtttaacctttcttttcatagagcagttaggaaacagtctgtttgtaaattctgtaagtggatattctgacatcttgtggccttcgttggaaacgggatttcttcatattctgctagacagaagaattatcagtaacttccttgtgttgtgtgtattcaactcacagagttgaacgatcctttacacagagcagacttgaaacactctttttgtggaatttgcaagtggagatttcagccgctttgaggtcaatggtagaataggaaatatcttcctatagaaaatagacagaatgattctcagaaactcctttgtgatgtgtgcgttcaactcacagagtttaacctttctgttcatagagcagttaggaaacactctgtttgtaaagtctgcaagtggatattcagacctctttgaggccttcgttggaaacgggatttcttcatattctgctagacagaataattctcagtaacttccttgtgttgtgtgtattcaactcacagagttgaactttcatttagagagagcagatttgaaacactgtttttgtggaatttgcaagtggagatttcagccgctttgaggtcaatggtagaataggaaatatcttcctatagaaactagacagaatcattctcagaaactactctgcgatgtgtgcgttcaactctcagagtttaacttttcttttcattcagcagtttggaaacactctgtttgtaaagtctgcacgtggatattttgaccacttagaggccttcgttggaaacgggtttctttcctgtaaggctagacagaagaattcccagtaacttccttgtgttgtgtgcattcaactcacagagttgaacgttcccttagacagagcagatttgaaacactctatttgtgcaatttgcaagtgtagattccaagcgctttaaggtcaatggcagaaaaggaaatatcttcgtttcaaaactagacagaatcattcccacaaactgcgttgtgatgtgttcgttcaactcacagagtttaacctttctgttcatagagcatttaggaaacactctgtttgtaaagtctgcaagtggatattcagacctccttgaggccttcgttggaaacgggatttcttcatattctgctagacagaagaattctcagtaacttccttgtgttgtgtgtattcaactcacagagttgaacgatcctttacacagagcagacttgaaacactctttttgtgaaatttgcaagtggagatttcagccgttttgaggtcaatggtagaaaaggaaatatcttcgtataaagactagacagaatgattctcagaaactcctttgtgatgtgtgcgttcaactcacagagttcaacctttcttttcatagagcagttgggaaacactctgtttgtaaagtctgcaagtggatattcagacctctttgaggccttctttggaagcgggatttcttcatattcttctagacagaagaattctcagtaacttccttgtgttgtgtgtattcaactcacagagttgaacgatcctttacacagagtagacttgaaacactctttttgtggaatttgcaagtggagatttcagccgctttgaggtcaatggtagaataggaaatatcttcctatagaaaccagacagaatgattctcagaaacttctttgcgatgtgtgcgttcaactcacagagtttaacctttcttttcatagagcagttaggaaacactctgtttgtaaactctgcaagtggatattcagacctctttgaggccttcgttggaaacgggatttcttcatactatgctagacagaagaattcccagtaacttccttctgttgtgtgtgttcaactcacagagttgaactttcatttacacagagtagatttgaaacactctttttgtggaatttgcaagtggagatttcaagcgctttgaggccaaaggcagaaaaggaaatatcttcgtttcaaaactagacagaatcattctcagaaactgctctgcgatgtgtgccttcaactctcagagtttaacttttcttttcattcagcagtttggaaacactctgtttgtaaagtctgcacgtggatattttgaccacttagaggccttcgttggaaacgggtttttttcctgtaaggctagacagaagaattcccagtaacttccttgtgttgtgtacattcaactcacagagttgaacgttcccttagacagagcagatttgaaacactctttttgtgcaattggcaaatggagatttcaagcgctttaagatcaatggcagaaaaggaaatatcttcgtttcaaaactagacagaatcattccaacaaactgcgttgtgatgtgttcgttcaactcacagagtttaacctttctgttcatagagcagttaggaaacactctgtttgtaaagtctgtaagtggatattctgacatcttgtggccttcgttggaaacgggatttcttcatattctgctagacagaagaattctcagaaacttcgttctgttgtgtgttttcaactcacagagttcaacgatcctttacagagagtagacttgaaacactctttttgtggaattggcagggtggagatttcagccgctttgaggtcaatggtagaaaaggaaatatcttcgtataaaaactagacagaatgattctcagaaactcctttgtgatgtgtgcgttcaactcacagtgtttaacctttcttttcctagagtagttaggaaacactctgtttttaaagtctgcaagtggatattcagacctctttgaggccttcgttggaaacgggatttcttcatattatgctagacagaagaattctcagtaacttccttgtgttgtgtgtattcaactgacagagttgaactttcatttagagatagcagatttgaaacactgtttttgtggaatttgcaagtggagatttcaagcgctttggggccaaaggaagaaaaggaaatatcttcgtataaaaactagacagaatcattctcagaaactgctgcgtgatgtgtgcgttcaactctcagagtttaacttttcttttcattcagcggtttggaaacactctgtttgtaaagtctgcacttggatattttgaccacttagaggccttcgttggaaacgggttttttttcatgtaaggctagacagaagaattcccagtaacttccttgtgttgtgtgcattcaactcacagagttgaacgttcccttagacagagcagatttgaaacactctatttgtgcaatttgcaagtgtagatttcaagcgctttaaggtcaatggcagaaaaggaaatttcttcgtttcaaaactagacagaaatcattcccacaaactgcgttgtgatgtgttcgttcaactcacagaagtttaacctttcttttcatagagcagttaggaaacagtctgtttgtaaattctgtaagtggatattctgacatcttgtggccttcgttggaaacgggatttcttcatattctgctagacagaagaattctcagaatcttcccttgtgttgtgtgtattcaactcacagagttgaacgatcctttacacagagcagacttgaaacactctttttgtggaatttgcaagtggagatttcagccgctttgaagtcaaaggtagaaaaggaaatatcttcctataaaaactagacagagtgattctcagaaactcctttgtgatgtctgcgttcaactcacagagtttaacctttcttttcatagagcagttaggaaacactctgtttgtaaagtctgcaagtggatattcagacctccttgaggccttcgttggaaacgggatttcttcatattatgctagacagaagaattctcagtaacttccttgtgttgtgtttattcaactgacagagttgaactttcatttagagagagcagatttgaaacactgtttttgtggaatttgcaagtggagatttcaagcgctttggggccaaaggcagaaaaggaaatatcttcgtataaaaactagacagaaatcattctcagaaactgctctgtgatgtgtgcgttcaactctcagagtttaacttttcttttcattcagcagtttggaaacactctgtttgtaaagtctgcacgtgcataatttgaccacttagaggtcttcgatggaaacgggtttttttcatgtaaggctagacagaagaattctcagtaacttccttgtgttgtgtgtattcaactcacagagttgaacgatcctttacacagagcagtcttgtaacactctttttgtggaatttgcaagtggagatttcagccgctttgaagtcaaaggtagaaaaggaaatatcttcctataaaaactagacagaatcattcccacaaactgcgttgtgatgtgtttgttcaactcacagagtttaacctttcttttcatagagcagttaggaaacagtctgtttgtaaattctgtaagtggatattctgacatcttgtggccttcgttggaaacgggatttcttcatattctgctagacagaagaattctcagaaacttccttgggttgtgtgtattcaactcacagagttgaacgatcgtttacacagagcagacttgaaacactctttttgtggaatttgcaagtggagatttcagccgctttgaggtcaatggtaggaaaggaaatatcttcgtataaaaattagacagaatgattctcagaaactcctttgtgatgtgtgcgttcaactcacagagtttaacctttcgtttcatagagcagttaggaaacactctgtttgtaaagtctgcaagtggatattaagacctctttgaggccttcgttggaaacgggatttcttcatattctgctagacagaagaattctcagtaacttccttgtgttgtgtgtattcaactgacagagttgaactttcatttagagagagcagatttgaaacactgtttttgtggaatttgcaagtggagatttccagcgctttggggccaaaggcagaaaaggaaatatcttcgtataaaaactagacagaatcattctcagaaactgctctgcgatgtgtgcgttcaactctcagagtttaacttttcttttcattcagcagtttggaaacactctgtttgtaaagtctgcacgtggataacttgaccacttagaggccttcgttggaaacgggtttttttaatgtaaggctagacagaagaattcccagtaacttccttgtgttgtgtacattcaactcacagagttgaacgttcccttagacagagcagatttgaaactctctttttgtgcaattggcaagtggagatttcaagcgctttaaggtcaatggcagaaaaggaaatatcttcgtttcaaaactagacagaatcattcccacaaactgcgttgtgatgtgttcgttcgactcacagagtttaacctttctgttcatagagcagttaggaaacactctgtttgtaaagtctgcaagtggatattcagacctccttgaggccttcgttggaaacgggatttcttcattttctggtagacagaagagttctcagtaacttccttgtgttgtgtgtattcaactcacagagttgaacgatcctttacacagagcagacttgaaacactctttttgtggaatttgcaagtggagatttcagccgcttttaggtcaatagtagaaaaggaaatatcttcgtagaaaaactagacagaatgattctcagaaactcctttgtgatgtgtgcgttcaactcacagagtttaacttttcttttcatagagcagttaggaaacactctatttgtaaagtctgcaagtggatattcagacctctttgaggccttcgttggaaacgggatttcttcatattatgctagacagaagaattttcagtaacttccttgtgttgtgtgtagtcaactgacagagttgaactctcatttagacagagcagatttgaaacactctttttgtggaatttgcaagcggagattacaagcgctttgaggccaaaggcagaaaaggaaatatcttcgtataaaaactagacagaatcattctcagaaactgctctgcgatgtgtgcgttcaactctcagagtttaacttttcttttcattcagcagtttggaaacactctgtttgtaatgtctgcacgtggatattttgaccacttagaggccttcgttgcaaacgggtttttttcctgtaaggctagacagaagaattcccagtaactatccttgtgttgtgtacattcaactcacaagcagttgaacgttcccttagacagagcagatttgaaacactctttttgtgcaattggcaagtggagatttcaagcgctttaaggtcaatggcagaaaaggaaacatcttcgtttcaaaactagacagaatgattctcagaaactcctttgtgatgtgtgcgttcaactcacagagtttaacctttcttttcatagagcagttaggaaacactctgcttgtaaagtctgcaagtggatattcagacctctttgaggccttcgttggaaacgggatttcttcatactgtgctagacagaagaattctcagtaacttccttgtgttgtgtgtattcaactcacagagttgaacgatcctttacacagagcggacttgaaacacactttttgtggaatttgcaagtggagatttcagccgcgttgaggtcaatggtagaaaaggaaatatcttcgtataaaaaccagacagaatgattctcagaaaatcttttgtgatgtgtgcgttcaactcacagagtttaacttttcttctcatagagcagttaggaaacactctgtttgtaaagtctgcatgtggatattcagacctctatgaggccttcgttggaaacgggatttctacatattatgctagacagaagaattctcagaaacttccttgtgttgtgtgttttcaactcacagagttgaacgatcctttacacagagcagacttgaaacactctttttgtggaatttgcaagtggagatttcagccgctttgaggtcaatggtagaataggaaatatcttcatatagaaactagacagaatgattctcagaaacttctttgtgatgtgtgcgttcaactcacagagtttaacctttcttttcatagagcagttaggaaacactctgtttgtaaactctgcaagtggatattcagacctctttgaggccttcgttggtaacgggatttcttcatactatgctagacagaagaattcccagtaacttccttgtgttgtgtgtgttcaactcacagagttgaactttcatttacacagagcagatttgaaacactctttttgtggaatttgcaagtggagatttcaagcgctttgaggccaaaggcagaaaaggaaatatctttgtttcaaaactagacagaatcattctcagaaactgctctgcgatgtgtgcgttcaagtctcagagtttaacttttcttttcattcagcagtttggaaacactctgtttgtaaagtctgcacgtggataatttgaccacttagaggccttcgttggaaacgggttttgttcatgtaaggctagacagaagaattcccagtaacttccttgtgttgtgtacattcaactcacagagttgaacgttccctttgacagagcagatttgaaacactctttttgtgcaattggcaagtggagatttcaagcgctttaaggtcaatggcagaaaaggaaatatcttcgtttcaaaactagacagaatgattctcagaaactcctttgtgatgtgtgcgttcaactcacagagttcaacctttcttttcatagagcagttgggaaacactctgtttgtaaagtctgcaagtggatattcagacttctttgaggccttcgttggaagcgggatttcttcatattctgcttgacagaagaattctcagtaacttccttgtgttgtgtgtattcaactcacagagttgaacgatcctttacacagagcatacttgaaacactcttgttgtggaatttgcaaggggagatttcagccgctttgaggtcaatggtagaataggaaacatcttcctatagaaactagacagaataattctcagaaactcctttgtgatgtgtgcgttcaactgacagagtttaacctttcttttcatagagcagttaggaaacactctgtttgtaaagtctgcaagtggatattcagacctctttgaggccttcgttggaaacgggtttttttcatataaggctagacagaagaattctcagtaacttccttgtgttgtgtgtatttaactcacagagttgaatgatcctttacacagaacagtcttgaaacactctttttgtggaatttgcaagtggagatttcagccgctttgaggtcaatggtagaataggaaatatcttcctatagaaactagacagaatgattctcagaaactcgtttgtgatgtgtgtgttcaactcacagagtttaacctttcttttcatagagcagttagtaaacactctgtttataaagtctgcaagtggatattcagacccctttgaggccttcgttggaaacgggatttcttcatattatgctagacagaagaattctcagtaacttccttgtgttgtgtgtattcaactgacagagttgaactttcatttggagagagcagatttgaaacactgtttttgtggaatttgcaagtggagatttcaagcgctttggggccaaaggcagaaaaggaaatatcttcgtataaaaactagacagaatcattctcagaaactgctgcgtgatgtgtgcgttcaactctcagagtttaacttttcttttcattcagccgtttggaaacactccgtttgtaaagtctgcacgtggaaattttgaccacttagaggccttcgttggaaacgggtttttttcatgtaaggctagacagaagaattcccagtaacttccttgtgttgtgtacattcaactcacagaattgaacgttcccttagacagagcagatttgaaacactctttttgtgcaattggcaagtggagatttcaagcgctttaaggtcaatggcagaaaaggaaatatcttcgtttcaaaactagacagaacgattctcagaaactcctttgtgatgtgtgcgttcaactcacagagtttaacctttcttctcatagagcagttaggaaacactctgtttgtaaagtctgcaagtggatattcagacatcttcgaggctttcgttggaaacgggatttcttcatattctgctatacagaagaattctcagtaacttccttgtgttgtgtgtattcaaatcacagagttgaatgatcctttacacagaacagacttgaaacactctttttgtggaatttgcaagtggagatttcagccgctttgaggtcaatggtagaataggaaatatcttcctatagaaactagacagaatgattctcagaaactcctttgtgatgtgtgcgttcaactcacagagtttaacctttcttttcatagagcagttaggaaacactctgtttgtaaagtctgcaagtggatattcagacctccttgaggccttcgttggaaacgggatttcttcctattctgctagacagaagaattcccagtaacttccttgtgttgtgtgtgttcaactcacagagttgaactttcatttacacagagcagatttgaaacactctttttgtggaatttgcaaatggagattttaagcgctttgaggccaaaggcagaaaaggaaatatcttcgtataaaaactagacagaatcattctcagaaactgctctgcgatgtgtgcgttcaactctcagagtttaacttttcttttcattcagaagtttggaaacactctgtttgtaaagtctgcacgtggatattttgaccatttagaggccttcgttggaaacgggtttttttcttgtaaggctagacagaagaattcccagtaacttccttgtgttgtgtagattcaactcacagagttgaacgttcccttagacagagcagatttgaaacactctttttgtgcaatcggcaagtggagatttcaagcgctttaaggtcaatggcagaaaaggaaatatcttcgtttcaaaactagacagaatcattcccacaaacggcgttgtgatgtgttcgttcaactcacagagtttaacctttctgttcatagagcagttaggaaacactctgtttgtaaagtctgcaagtggatattcagacctccttgaggccttcgttggaaacgggatttcttcatattctgctagacagaagaattctcagtaacttccttgtgttgtgtgtattcaactcacacagttgaacgatcctttacacagagcagacttgaaacactctttttgtggaatttgcaagtggagatttcagccgctttgaggtcaatggttgaaaaggaaactatcttcatataaagactagacagaatgattctcagaaactcctttgtgatgtgtgtgttcaactcacagagtttaacctttcttttcatagagcagttaggaaacactctgtttataaagtctgcaagtggatattcagacccctttgaggtcttcgttggaaacgggatttcttcatattatgctagacagaagaattctcagtaacttccttgtgttgtgtgtattcaactcacagagttgaaggatcctttacagagagcaggcttgaaacactctttttgtcgaatttgcaagtggagatttcagccgctttgaggtcaatggtagaataggaaatatcttcttatacaaactagacagaatgattctcagaaactcctttgtgatgtgtgcgttcaactcacagagtttaacctttcttttcatagagcagttaggaaacactctgtttgtaaagtctgcaagtggatattgagacctcctttaggacttcgttggaaacgggatttcttcatattatgctagacagaagaattcccagtaacttctttgtgttgtgtacattctactcacagagttgaacgttcccttagacagagcagatttgaaacactctttttgtgcaattggcaagtgttgatttcaaccgctttgaggtcaatggtagaaaaggaaatatcttcgtataaaaactagacagaatcattcccgcaaactgcgttgtgatgtgttcgttcaactcacagagtttaacctttcttttcatagagcagttaggaaacagtctgtttgaaaattctgtaagtggatattctgacatcttgtggccttcgttggaaacgggatttcttcatattctgctagacagaagaattctcagtaacttccttgtgttgtgtgtattcaactcacagagttgaacgatcctttacacagagcagacttgaaacaccctttttgtggaatttgcaagtggagatttcagccgcgttgaggtcaatggtagaaaaggaaatatcttcgtataaaaactggacagaaggattctcagaaactcctttgtgatgtgtgcattcaactcacagagtttaacctttcttttcatagagcagttaggaaacactctgtttgtaaagtctgcaagtggatattcagacctctttgaggccttcgttggaaacgggatttcttcatattctgctagacagaagaattctcagtaacttccttgtgttgtgtgtattcaactcacagagttgaacgatccttttcacagagcagacttgaaacactctttttgtggaatttgcaagtggagatttcagccgctttgaggtcaatggtagaataggaaatatcttcgtagaaaaactagacagaatgattctgagaaactcctttgtgatgtgtgcgttcaactcacacagtttaacctttcttttcatatagcagttaggaaacactctgtttgtaaagtctgcaagtggatattcagacctccttgaggccttcgttggaaacgggatttcttcaaattctgctagacagaagaattcccagtaacttccttgtgttgtgtacattcaactcacagagttgaacgtttccttagacagagcagatttgaaacactctttttgtgcaattggcaagtggtgatttcagccgctttgtggtcaatggtagaaaaggaaatatcttcatataaaaactagacagaatcattcccacaaactgcgttgtgatgttttcgttcaactcacagggtttaacctttcttttcatagagcagttaggaaacactctgtttgtaaagtctctaagtggatatactgacatcttgttgccttctttggaaacgggatttcttcatattctgctatacagaagaattctcagtaacttccttgtgttgtgtgtattcaactcacagagttaaatgatcctttacacagagcagacttgaaaaactctttttgtggaatttgcaagtggagatttcagccgctttgtggtcaatggtagaataggaaatatcttcctatagaaactagacagaatgattctcaggaactcctatgtgatgtgtgcgttcaactcacagagtttaacttttcttttcatagagcagttaggaaacactctgtttgtaaagtctgcaagtggatattcagacctcttgaggccttcgttggaaacgggatttcttcatattatgctagacagaagaattctcagtaacttaccttgtgttgtgtgtattcaactgacagagttgaactttcatttagagagagcagatttgaaacactgtttttgtggaatttgcaagtggagatttcaagcgctttgcggccaaaggcagaaaaggaaatatcttcgtataaaaactagacagaatcattctcagaaactgctgcgtgatgtatgcgttcaactctcagagtttaacttttcttttcattcagcggtttggaaacactctgttgtaaagtctgcacgtggatattttgaccacttagaggccttcgttggaaaggggtttttttcatgtaaggctagacagaagaattcccagtaacttccttgtgttgtgtgcattcaactcacagagttgaacgttcccttagacagagcagatttgaaacactctatttgtgcaatttgcaagtgtagatttcaagcgctttaaggtcaatggcacaaaaggaaatatcttcgtttcaaaactagacagaatcattcccacaaactgcgttgtgatgtgttcgttcaactcacagagtttaacctttctgttcatagagcagttaggaaacactctgtttgtaaagtctgcaagtggatattcagacctccttgaggctttctttggaaacgggatttcttcatattctggtagacagaagaattctcagaaacttccttgtgttctgtgtattcaactcacagagatgaacgatcctttacacagagcagatttgacacactctttttgtggaatttgcaagtggagatttcagccgctttgaggtccatggtagaaaaggaaatatcttcgtataaaaactagacagaatgattctcagaaactcctttgtgatgtgtgcgttcaactcacagagtttaacttttctgttcatagagcagttaggaaacactctgtttgtaaagtctgcaagtggatattcagacctctttgaggccttcgttggaaacgggatttcttcatattattctagacagaagaattcccagtaacttccttgtgttgtgtgtgttcaactcacagagttaaacttccatttacacagagcagatttgaaacactctttttgtggaatttgcaagtggagatttcaagcgctttgaggccaaaggcagaaaaggaaatatcttcgtttcaaaactagacagaaatcattctcagaaactgctctgcgatgtgtgcgttcaactctcagcagtttaacttttcttttcattcagcagtttggaaacactctgtttttaaagtctgcacgtggataatttgaccacttagaggccttcgttggaaacgggtttttttcatgtaaggctagacagaagaattctcagtaacttccttgtgttgtgtgtattcacctcacagagttgaacgatcctttacacagagcagacttgtaacactctttttgtggaatttgcaagtggagatttcagccgctttgaagtcaaaggcagaaaaggaaatatcttcctataaaaactagacagaatcattcccacaaactgcgttgtgatgtgttcgttcaactcacagagtttaacctttctattcatagagcagttaggaaacactctgtttgtaaagtctgcaagtggatattcagaccaccttgaggccttcgttggaaacgggatttcttgatattctgctagacagaagatttctcagtaacttccttgtgttgtgtgtattcaactcacagagttgaacgatcctttacacagagcagacttgaaacactctttttgtggaatttgcaagtggagatttcagccgctttgaggtcaatggtagaataggaaatatcttcgtatagaaactagacagaatgattctcagaaactcctttgtgatgtgtgcgttcaactcacagagttcaacctttcttttcatagagcagttgggaaacactctgtttgtaaagtctgcaagtggatattcagacttctttgaggccttcgttggaagcgggatttcttcatattctgctagaaagaagaattcccagtaacttcccttgtgttgtgtgtgttcaactcacagagttgaactttcatttacacagagcagatttgaaacactctttttgtggaatttgcaggtggagatttcaagcgctttgaggccaaaggcagaaaaggaaatatcttcgtataaaaactagacagaatcattctcagaaactgctctgcgatgtgtgcgttcaactctcagagtttaacttttcttttcattcagcagtttggaaacactctgtttgtaaagtctgcacgtggataacttgaccacttagaggccttcgttggaaacgggtttttttcctgtaaggctagacagaagaattcccagtaacttccttgtgttgtgtgcattcaactcacagagttgaacgttcccttagacagagcagatttgaaacactctatttgtgcaatttgcaagtgtagatttcaagcgctttaaggtcaatggcagaaaaggaaatatctccgtttcaaaactagacagaatcattcccacaaactgcgttgtgatgtgctcgttcaactcacagagtttaacctttctgttcatagagcagttaggaaacactctgtttgtaaagtctgtaagtggatattctgacatcttgtggccttcgttggaaacgggatttcttcatattctgctagacagaagaattctcaataacttccttgtgttgtgtgtattcaactcacagagttgaacgatcctttacacagagcagacttgaaacactctttttgtggaatttgcaagtggagatttcagccgctttgaggtcaatggtagaaaagggaatatcttcgtatcgaaactagacagaatgattctcagaaactcctttgtgatgtgtgcgttcaactcacagagtttaacctttctgttcatagagcagttaggaaacactctgtttgtaaagtctgcaagtggatattcagacctccttggggccttcgttggaaacgggatttcttcatattctgctagacagaagaattcccagtaacttccttgtgttgtgtgtgttcaaatcacagagttgaactttcatttacacagagcagatttgaaacactctttttgtggaatttgcaagtggagatttcaagcgctttgaggccaaaggcagaaaaggaaatatcttcgtttcaaaactagacagaatcattctcagaaactgctctgcgatgtgtgcgttcaactctcagagtttaacttttcttttcattcagcagtttggaaacactctgtttgtaaagtctgcacgtggataacttgaccacttagaggccttcgttggaaccgggtttttttcatgtaaggctagacagaagaattcccagtaacttccttgtgttgtgtgcattcaactcacagagttgaacgttcccttagacagagcagatttgaaacactctatttgtgcaatttgcaagtgtagatttcaagcgctttaaggtcagtggcagaaaaggaaatatcttcgtttcaaaactagacagaatcattcccacaaactgcgttgtgatgtgttcgttcaactcacagagtttaacctttcttttcatagagcagttaggaaacagtctgtttgtcaattctgtaagtggatattctgacatcttgtggccttcgttggaaacgggatttcttcatattctcctagacagaagaattctcagtaacttccttgtgttgtgtgtattcaactcacagagttgaacgatcctttacacagagcagacttgaaacactctttttgtggaatttgcaagtggagatttcagccactttgaggtcaatggtagaaaaggaaatatcttcgtagaaaaactagacagaacgattctcagaaactcctttgtgatgtgagcgttcaactcacacagtttaacctttcttttcttagagcagttaggaaacactctgtttgtaaagtctgcaagtggatattcagacctctttgaggccttcgttggaaacgggatttcttcgtattctgctagacagaagaattctcagtaacttcttggtgttgtgtgtattcaactcacagagttgaacgatgctttacacagagcagacttgaaacactctttttgtggaatttgcaagtggagatttcagccgctttgaggtccatggtagaaaaggaaatatcttcgtataaaaactagacagaatgattctcagaaactcctttgtgatgtgtgcgttcaactcacagagtttaaactttcttttcatagagcagttaggaaacactctgtttgtaaagtctgcaggtggatattcagacatcattgaggctttcgttggaaaagggatttcttcatattctgctagacagagaattcccagtaacttccttgtgttgtgtgtgttcaactcacagagttgaactttcatttacacagagcagatttgaaacactctttttgtggaatttgcaagtggagatttcaagcgctttgaggccaaaggcagaaaaggaaatatcttcgtttcaaaactagacagaatcattctcagaaactgctctgcgatgtgtgcgttcaactctcagagtttaacttttcttttcattcagcagtttggaaacactctgtttgtaaagtctgcacgtggatattttgaccacttagaggctttcgttggaaacggatttttttcctgtaaggctagacagaagaattcccagtaacttccttgtgttgtgtacattcaactcacagagttgaacgttcccttagacagagcagatttgaaacactctttttgtgcaattggcaagtggagatttcaagcgctttaaggtcaatggaagaaaaggaaatatcttcgtttcaaaactagacagaatcattcccacaaactgcgttgtgatgtgttctttcaactcactgagtttaacctttcttttcatagagcagttaggaaacaatctgtttgtaaattctgtaagtggatattctgacatcttgtggccttcgttggtaacgggatttcttcatattctgttagacagaagaattctcagtaacttccttgtgttgtgtgtattcaactcacagagttgaacgattctttacacacagcagacttgaaacactctttttgtggaatttgcaagtggagatttcagccgctttcaggtcaatggtagaataggaaatatcttcctatagaaactagacagaatgattctcagaaactcctttgtgatgtgtgcgttcaactcacagagttttaccattcttttcatagagcagttaggaaacactctgtttgtaaagtctgcaagtggatattcagacctctttgaggccttcgttggaaacgggatttcttcatattctgctagagagaagaattctcagtaacttccttgtgttgtgtgtattcaactcacagagttcaacgatcctttacacagagcagacttgaaacactctttttgtggaatttgcaagtggagatttcagccgctttgaagtcaatggtagaaaaggaaatatcttcgtataaaaagtagacagaatgattctcagaaactcctttgtgatgtgtgcattcaactcacagagtttaacctttcttttcatagagcagttaggaaacactctgtttgtaaagtctgcaactggatattcagacctccttaaggccttcgttggaaacgggatttcttcatattatgctagacagaagaattcccagtaacttcccttgtgttgtgtgtgttcaactcacagagttgaactttcatttacacagagcagatttgaaacactctttttgtggaatttgcaagtggagatttcaagcgctttgaggtcaaaggcagaaaaggaaatatcttcgtataaaaactagacagagtctttctcagaaactgctctgtgatgtgtgcgttcaactctcagagtttaacttttcttttcattcagcagtttggaaacactctgtttgtaaagtttgcacgtggacattgtgaccacttagaggccttcgttggaaacgggtttttttcatgtaaggctagacagaagaattcccaataacttccttgtgttgtgtgcactcaagtcacagagatgaatgttcccttagacagagcagatttgaaacactctatttgtgcaatttgcaagtgtagatttcaagcgctttaaggtcaatggcagaaaaggaaatattttcgtttcaaaactagacagaatgattctcagaaactcctttgtgatatgtgcgttcaactcacagagtttaacctttcttttcatagagcagttaggaaacactctgtttgtaatgtctgcaagtggatattcagacatctttgaggctttcgttggaaacgggatttcttcatattctgctagacagaagaattctcagaaacttccttgtgttgtgtgttttcaactcacagagttgaacgatcctttaccacagagcagacttgaaacactctttttgtggaatttgcaagtggagatttcagccgctttgaggtcaatggtagaaaaggaaatatcttcgtataaaaactagacagaatgattctcagaaactcctttgtgatgtgtgcgttcaacacacagagttaaacttttcttttcatagagcagttaggaaacactctgtttgtaaagtctgcaagtggatattcagacctctttgaggccttcggtggaaacgagatttcttcatattatgctagacagaacaattctcagtaacttccttgtgttgtgtgtattcaactcacagagttgaacgatcctttacagagagcacacttgaaacactctttttgtggaatttgcaagtggagatttcagccgctttgaggtcaatggtagaataggaaatatcttccaatagaaactagacagaatcattctcagaaactgctctgcgatgtgtgcgttcaactctcagagtttaacttttcttttcattcagcagtttggaaacactctgtttgtaaagtctgcacgtggataatttgaccacttagaggccttcgttggaaacgggtttttttcatggaaggctagacagaagaattcccagtaacttccttgtgttgtgtacattcaactcacagagttgaacgttcccttagacagagcagatttgaaacactctttttgtgcaattggcaaatggagatttcaagcgctttaaggtcaatggtagaataggaaatatcttcgtttgaaaactagacagaatcattcccacaaactgcgttgtgattgtgttcgttcaactcacagagtttaacctttctgttcatagagcagttaggaaacactctgtttgtaaagtctataagtggatattctgacatcttgtggccttcgttggaaacgggatttcttcatattctgctagacagaagaattctcagtaacttccttgtgttgtgtgtattcaactcacagagttgaacgatactttacacagagcagacttgtaacactctttttgtggaatttgcaagtggagatttcagccgctttgaagtcaaaggtagaaaaggaaatatcttcctataaaaactagacagaatgattctcagaaactcctttgtgatgcgtgcgttcaactcacagagtttaacctttcttttcatagtgcagttaggaaacactctgtttgtaaagtctgcaagtggatattcagacctccttgaggccttcgttggaaacgggatttctacatattatgctagacagaagaattctcagtaacttccttgtgttgtgagtattcaactcacagatttgaacgatcctttacacagagcagacttgaaacagtctttttgtggaatttgcaagtggagatttcagcctctttgaggtcaatggtagaataggaaatatcttcctatagaaactagacagaatcattctcagaaactgctctgcgatgtgtgcgttcaactctcagagtttaacttttcttttcattcagcagtttggaaacactctgtttgtaacgtctgcacgtgaataatttgaccacttagaggccttcgttggaagcgggtttttttcatgtaaggctagacagaagaattcccagtaacttccttgtgttgtgtgcattcaactcacacagttgaacgttcccttagacagagcagatttgaaacactctatttgtgcaatttgcaagtgtagatttcaagcgctttaaggtcaatggcagaaaaggaaatttcttcgtttcaaaactagacagaatcattcccacaaactgcgttgtgatgtgttcgttcaactcacagagtttaacctttctgttcatagagcagttaggaaacactctgtttgtacagtctgcaagtggatattcagacctccttgaggccttcgttggaaacgggatttcttcatattctgctagacagaagaattctcagaatcttccttgtgttgggtgtattcaactcacagagttgaacgatcctttacacagagcagacttgaaacactctttttgtggaatttgcaagtggagatttcagccgctttgaggtccatggtagaaaaggtaatatcttcgtataaaaactagacagaatgattctcagaaactcctttgtgatgtgtgcgctcaactcacagagtttaacctttcttttcatagagtagttaggaaacactctgtttgtaaagtctgcaagtggatattcagacctctttgaggccttcgtaggaaacgggatttcttcatattatgctagacagaagaattcccagtaacttccttgtgttgtgtgtgttcaactcacagagttgaactttcatttacacagagcagatttgaaactctctttttgtggaatttgcaaatggagatttcaagcgctttgaggtcaaaggcagaaaaggaaatatcttcgtataaaaactagacagaatcattctcagaaactgctctgcgatgtgtgcgttcaactctcagagtttaacttttcttttcattcagcagtttggaaacactctgtttgtaaagtctgcacgtggataatttgaccacttagaggccttcgttggaaacgggtttttttcatgtaaggctagacggaagaattcccagtaacttccttgtgttgtgtacattcaactcacagagttgaacgttcccttagacagagcagatttgaaatactctttttgtgcaattggcaagtggagatttcaagcgctataaggtcaatggcagaaaaggaaatatcttcgtttcaaaactagacagaatcattcccacaaactacgttgtgatgtgttcgttcaactcacagagtttaacctttcttttcatagagcagttaggaaacagtctgtttgtaaattctgtaagtggatattctgacatcttgtggccttcgttggaaacgggatttcttcatattctgctagacagaagaattctcagaatcttccttgtgttgtgtgtattcaactcacagagttgaacgacggtttacacagagcagatttgaaacactcatttggtggaatttgcaagtggagatttcagccgctttgaggtcaatggtagaaaaggaaatatcttcgtataacaactagacagaatgattctcagaaactcctttgtgatgtgtgtgttcaactcacagagtttaacttttcttttcatagagcagttagtaaacactctgtttataaagtctgcaagtggatattcagacccctttgtggccttcgttggaaacgggatttcttcatattatgctagacagaagaattctcagtaacttcccttgtgttgtgtgtattcaactgacagagttgaactttcatttagagagagcagttttgaaacactgtttttgtggaatttgcaagtggagatttcaagcgctttggggccaaaggcagaaaaggaaatatcttcgtataaaaactagacagaatcattctcagaaactgctctgcgatgtgtgcgttcaactctcagagtttaacttttcttttcattcagcagtttggaaacactctctttgtaaagtctgcacgtggatattttgaccacttagaggcattcgttggaaacgggtttttttcctgtaaggctagacagaagaattcccagtaacttccttgtgttgtgtgcattcaactcacagagttgaacgttcccttagacagagcagatttgaaacactctatttgtgcaatttgcaagtgtagatttcaagcgctttaaggtcaatggcagaaaaggaaatatcttcgttcaaaactagacagaatcattcccacaaactgcgttgtgatgtgttcgttcaactcacagagattaacctttctgttcatagagcagtgaggaaacactctgtttgtaaagtctgtaagtggatattctgacatcttgtggccttcgttggaaacgggatttcttcatattctgctagacagaagaattctcagtaacttccttgtgttgtgtgtattcaactcacagagttgaacgatcctttacacagagcatagttgaaacactcttgttgtggaatttgcaagtggagatttcagccgctttgaggtcaatggtagaataggaaatatcttcctatagaaactagacagaatgattctcagaaactcctttgtgatgtctgcgttcaactcacagagttaaactttcttttcatagagcagttaggaaacactctgtttgtaaagtctgcaagtggatattcagacctccttgaggccttcgttggaaaagggatttcttcatattatgctagacagaagtattcccagtaacttccttgtgttgtgtgtgttcaactcacagagttgaactttcatttacaatgagcagatttgaaacactctttttgtggaatttgcaagtggagatttcaagcgctttgaggccaaaggcagaaaaggaaatatcttcgtataaaaactagacagaatcattctcagaaactgctctgcgatgtgtgcgttcaactctcagagtttaacttttcttttcattcagcagtttggaaacactctgtttgtaaagtctgcacgtggatattttgaccacttagaggccttcgttggaaacgggtttttttcctgtaaggctagacagagaattcccagtaacttccttgtgttgtgtgcattcaactcacagagttgaacgttcccttagacagagcagatttgaaacactctgtgcaatttgcaagtgtagatttcaagcgctttaaggtcaatggcagaaaaggaaatatcttcgtttcaaaactagacagaatcattcccacaaactgcgttgtgatgtgttcgttcaactcacagagtttaacctttcttttcatagagcagttaggaaacactctgttggtaaattctgtaagtggatattctgacatcttgtggccttcgttggaaacgggatttctacatattctgctagacagaagaattctcagtaacttccttgtgttgtgtgtattcaactcacagagttgaaagatcctttacacagagcagacttgaaacactctttttgtggaatttgcaagtggagatttcagccgctttgaggtcaatggtagaaaaggaaatatcttcgtataaagactagacagaatgattctcagaaactcctttgtgatgtgtgcgttcaactcacagagtttaacctttcttttcatagagcagttaggaaacactctgtttgtaaagtctgcaagtggacattcagacctctttgaggccttcgttggaaacgggtttttttcatataaggctagacagaagaattcttagtaacttccttgtgttgtgtgtattcaactcacagagttgaatgatcctttacacagaacagtcttgaaacactctttttgtggaatttgcaattggagatttcagccgctttgaggtcaatggtagaataggaaatatcttcctatagaaactagacagaatgattctcagaaactcctttgtgatgtgtgtgttcaactctcagaatttaacctttcttttcatagagcagttagtaaacactctgtttataaagtctgcaagtggatattcagatccctttgtggccttctttggaaacgggatttcttcatattatgctagacagaagaattctcagtaacttccttctgttgtgtgtattcaactgacagagttgaactttcatttagagagagcagatttgaaacactgtttttgtggaatttgcaagtggagatttcaagcgctttggggccaaaggaagaaaaggaaatatcttcgtataaaaactagacagaatcattctcagaaactgctctgcgatgtgtgcgttcaactctcagagtttaacttcgcttttcattcagcagtttggaaacactctgtttgtaaagtctgcacgtggataatttgaccacttagaggccttcgttggaaacgggtttttttcatgtaaggctagacagaagaattctcagtaacttccttgtgttgtgtgtattcaactcacacagttgaaggatcctttacacagagcagacttgtaacactctttttgtggaatttgcaagtggagatttcagccgctttgaagtcaaaggtagaaaaggaaatatcttcctataaaaactagacagaatcattcccacaaactgcgttgtgatgtgttcgttcatctcacagagtttaacctttcttttcatagagcagttaggaaacagtctgtttgaaaattctgtaagtggatattctgacatcttgtggccttcgttggaaacgggatttcttcatattctgctagacagaagaattctcagtaacttcccttgtgttgtgtgtattcaactcacagagttgaacgatcctttacacagagcagacttgtaacactctttttgtggaatttgcaagtggagatttcagccgctttgaagtcaaaggcagaaaaggaaatgtcttcgtttcaaaactagacagaatgattctcagaaactcctttgtgatgtgtgcgttcaactcaaagagtttaacctttcttttcacagagcagttaggaaacactctgtttgtaaagtctgcaagtggatattcagacctccttgaagccttcgttggaaaagggatttcttcatattatgctagacagaagaattcccagtaacttccttgtgttgtgtgtgttcaactcacagagttgaactttcatttacacagagcagatttgaaacactctttttgtggaatttgcaagtggagatttcaagcgctttgaggccaagaggcgagaaaaggaaatatcttcgtttcaaaactagacagaatcattctcagaaactgctctgcgatgtgtgcgttcaactctcagagtttaactttgcttttcatttagcagtttggaaacactctgtttgtaaagtctgcacgtggatattttgaccacttagaggccttcgttgtaaacgggtttctttcctgtaaggctagacagaagaattcccagtaacttccttgtgttgtgtgcattcaactcacagagttgaacgttccctagacggagcagatttgaaacactctatttgtgcaatttgcaagtgtagatttcaagggctttaaggtcaatggcagaaaagggaatatcttcgtttcaaaactagacagaatgattctcagaaactactttgtgatgtgtgcgttcaactcacagagtttaacctttcttttcatagagcagttaggaaacactctgtttgtaaagtctgcaagtggatattcagacctctttgaggccttcgttggaaacggaatttcttcatactgtgctagacagaagaattctcagtaacttccttgtgttgtgtgtattcaactcacagagttgaacgatcctttacacagagcggacttgaaacacactttttgtggaatttgcaagtggagatttcaagcgctttgaggccaaaggcagaaaaggaaatatcttcgtataaaaactagacagaatgattctcagaaactcctttgtgatgtgtgcgtttaactcacagagtttaacctttctcttcatagagcagtttggaaacactctgtttgtaaagtctgcaagtggatattcagacctccttgaggtcttcgttggaaacgggatttcttcatattatgctagacagaagaattctcagtaacttccttgtgttgtgtgtattcaactgacagagttgaactttcatttagagagagcagatttgatacactgtttttgtggaatttgcaagtggagatttcaagcgctttgcggccaaaggcagaaaaggaaatatcttcgtataaaaactagacagaatcattctgagaaactgctctgcgatgtgtgcgttcaactctcagagtttaacttttcttttcattcagcagtttggaaacactctgtttgtaaagtctgcacgtggatattttgaccacttagaggccttcgttggaaacgggtttttttcctgtaaggctagacagaagaattcccagtaacttccttgtgttgtgtacattcaactcacatagttgaacgttcccttagacagagcagatttgaaacactctttttgtgcaattggcaaatggagatttcaagcgctttaaggtcaatggcagaaaaggaaatatcttcgtttcaaaactagacagaatgattctcagaaactcctttgtgatgtgtgcattcaactcacagagtttaacctttcttttcatagagcagttaggaaacactctgtttgtaaagtctgcaagtggatattcagacctctttgaggccttcgttggaaacgggatttcttcatattctgctagacagaagaattctcagtaacttccttgtgttgtgtgtattgaactcgcagagttgaacgatcctttacacagagcagacttgaaacactctttttgtggaatttgcaagtggagatttcagccgctttgaggtcaatagtagaaaaggaaatatcttcgtagaaaaactagacagaatgattctcagaatctcctttgtaatgtgtgcgttcaactcacagagtttaacctttcttttcataaagcagttaggaaacactctgtttgtaatgtctgcaagtggatattcagacctctttgaggccttcgttggaaacgggatttcttcatattctgctagacagaagaattcccagtaacttctttgtgttgtgtgtgttcaactcacagagttgaactttcatttacacagagcagatttgaaacactctttttgtggaatttgcaagtggagatttcaagcgctttgaggccaaaggcagaaaaggaaatatcttcgtataaaaactggacagaatcattctcagaaactgctctgcgatgtgtgcgttcaactctcagagtttaacttttcttttcattcagcagtttggaaacactctgtttgtaaagtctgcacgtggataatttgaccacttggaggccttctttggaaacgggtttttttcctgtaaggctagacagaagaattcccagtaacttccttgtgttgtgtgcattcaactcacagagttgaaagttcccttagacagagcagatttgaaacactctatttgtgcaatttgcaagtgtagatttcaagcgctttaaggtcaacggcagaaaaggaaatatcttggtttcaaaactagacagaatgattctcagaatcttctttgtgatgtgtgcgttcaactcacagagtttaacctttcttttcatagagcagttaggaaacactctgtttgtaaactctgcaagtggatattcagacctctttgaggccttcgttggaaacgggatttcttcatactgtgctatacagaagaattctcagtaacttccttgtgttgtgtgtattcaactcacagagttgaacgaccctttacacagagcggacttgaaacactctttttgtggaatttgcaagtggagatttcagccgcgttgaggtcaatggtagaaaaggaaatatcttcgtataaaaactagacagaatgattctcagaaacttcattgtgatgtgtgcgttcaactcacagagtttaacctttcttttcatagagcagttaggaaacactctgtttgtaaactctgcaagtggatattcagaccactttgaggccttcgttggaaacgggatttctccatactgtgctagacagaagaattctcagtaacttccttgtgttgtgtgtattcaactcacagagttgaacgatgctttacacagagcggacttgaaacactcgttttgtggaatttgcaagtggagatttcagccgatttgaggtcaatggtagaaaaggaaatatcttcgtataaaaactagacagaatgattctcataaactcctttgtgatgtgtatgttcaactcacagagtttaacttttctattcatagagtagttaggaaacactctgtttgtaaagtctgcaagtggatattttgacctctttgaggcctccgttggaaacgggttttcttcatgtaaggctagacagaagaattctcagtaacttccttctgttgtgtacattcaactcacagagttgaacgttcccttagacagagcagatttgaaacactctttttgtgcaattggcaagtggagatttcaagcgctttaaggtcaatggcagaaaaggaaatatcttcgtttcaaaacgagacagaatcattctcagaaactgctctgcgatgtgtgcgttcaactctcagagtttaacttttcttttcattcagcagtttggaaacactctgtttgtaaagtctgcacgtggataatttgaccacttagaggccttctttggaaacgggtttttttcatgtaaggctagacagaagaattctcagtaactttccttgtgttgtgtgtattcaactcacagagttgaacgatcctttacacagagcagacttgtaacactctttttgtggaatttgcaagtggagatttctgccgctttgaagtcaaaggtagaaaaggaaatatcttcctataaaaactagacagaatgattctgagaaactcctttgtgatgtgtgcattcaactcacagagtttaacctttcttttcatagagcagttaggaaacactctgtttgtaaagtctgcaagtggatattcagacctccttgaggccttcgttggaaacgggatttaatcatattctgctagacagaagaattctcagtaacttccttttgttgtgtgtattcaactcacagagttgaatgatcctttacacagagcagacttgaaacactctttttgtggaatttgcaagtggagatttcagccgctttgagttcaatggtagaataggaaatatcttcctatagaaactagacagaatcattctcagaagctgctctgcgatgtgtgcgttcaactctcagagtttaacttttcttttcattcagcagtttggaaacactctgtttgtaaagtctgcacgtggataatttgaccacttagaggccttcgttggaaacgggtttttttcatgtaaggctagacagaagagttctcagtaacttcccttgtgttgtgtgtattcaactcacacagttgaacgatcctttacagagagcagacttgtaacactctttttgtggaatttgcaagtggagatttcagccgctttgaagtcaaagtagaaaaggaaatatcttcctataaaaactagacagaatcattcccacaaactgcgttgtgatgtgttcgttcaactcacagagtttaacctttcttttcatagagcatttaggaaacactctgtttgtaaagtctgcaagtggatattcagacctctttgaggccttcgttggaaacgggtttttttcatataaggctagacagaagaattctcagaaacttccttgtgttgtgtgtcttcaactcacagagttgaacgatcctttacacatagcagacttgaaacacactttttttggtattttcaagtggagatttcagccgctttgaggtcaatggtagaaaaggaaatatcttcgtataaagactagacagaatgattctcagaaactcctttgtgatgtgtgcgttgaactcacagagtttaacgtttcttttcatagagcagttaggaaacactctgtttgtaaagtctgcaaggggatattcagacctctctgaggccttcgttggaaacgggatttcttcatattctgcttcacagaagaattctcagtaacttccttgtgttgtgtgtattcaactgacagagttgaactttcatttagacagagcagatttgaaaagctctttatgtggaatttgcaattggagatttcaagcgctttgaggccaaagacagaaaaggaaatatcttcgtataaaaactagacagaatcattctcagaaactgctctgcgatgtgtgcgttcaactctcagagtttaacttttcttttcattcagcagtttggaaacactctgtttgtaaagtctgcacgtggataacttgaccacttagaggccttcgttggaaacgggtttttttcatgtaaggctagacagaagaattcccagtaacttccttgtgttgtgtgcattcaactcacagagttgaacgttcccttagacagagcagatttgcaacactctatttgtgcaatttgcaagtgtagatttcaagcgctttaaggtcaatggcagaaaaggaaatatcttcgtttcaaaactagacagaatcattcccacaaactgcgttgtgatgtgttcgttcaactcacagagtttaacctttccgttcatagagcagttaggaaacacactgtttgtaaagtctgtaagtggatactctgacatcttgtggccttcgttggaaacgggatttcttcatattctgctagacagaagaattctcagtaacttccttgttttgtgtgtattcaactcacagagttgaacgatcctttacacagagcatacttgaaacactcttcttgtggaatttgcaagtggagatttcaaccgctttgaggtcaatggtagaataggaaatatcttcctatagaaactagacagaatgattctcagaaacttctttgtgatgtgtgcgttcaactcacagagtttaacctttcttttcatagagcagttaggaaacactttgtttgtaaagtctgcaagtggatattcagacctctttgaggccttcgttggaaacgggatttcttcatactatgctagacagaagaattcccagtaacttccttgtgttgtgtgtgttcaactcacagagttgaactttcatttacacagagcagatttgaaacactctttttgtggaatttgcaaatggagatttcaagcgctttgaggtcaaaggcagaaaagaaaatatcttcgtataaaaactagacagaatcattctcagaaactgctgcgtgatgtgtgcgttcaactctcagagtttaacttttcttttcattcagcggtttggaaacactctgtctgtaaagtctgcacgtggatattttgaccacttagaggccttcgttggaaacgggtttttttcatgtaaggctagacagaagaattcccagtaacttccttgtgttgtgtgcattcaactcacagagctgaacattcccttgacagagcagatttgaaacactctatttgtgcaatttgcaagtgtagatttcaagcgctttaaggtcaatggcagaaaaggaaatatcttcgtttcaaaactagacagaatgattctcagaaactcctttgtgatgtgtgcgttcagctaacagagtttaacctttcttttcatagagcagttcggaaacactctgtttgtaaagtctgcaagtggatattcagacctctttgaggccttcgttggaaacgggatttcttcatattctgctagacagaagaattctcagtaacttccttgtgttgtgtgtattcaactcacagagttgaacgattctttacacagagcagacctgaaacactctttttgtggaatttgcaagtggagatttcagccgctttgaggtcaatggtacaaaaggaaatatcttcgtataaagactagacagaatgattctcagaaactcctttgtgatgtgtgtgttcaactcacagagcttaacctttcttttcatagagcagttagtaaacactctgtttataaagtctgcaagtggatattcagacccctttgaggccttcgttggaagcgggatttcttcatattatgctagacagaagaattctcagtaacttccttgtgttgtgtgtattcaactgacagagttgaacttttatttagagagagcagatttgaaacactgtttttgtggaatttgcaagtggagatttcaagcgctatggggccaaaggcagaaaaggaaatatctttgtataaaaactagacagaatgattctcagaaactgctgcgtgatgtgtgcgttcaactctcagagtttaacttttcttttcattcagcggtttggaaacactctgtttgtaaagtctgcacgtggatattttgaccacttagaggccttcgttggaaacgggtatttttcatgtaaggctagacagaagaattcccagtaactttccttgtgttgtgtacattcaactcacagagttgaacgttcccttagacagagcagatttgaaacactctttttgtgcaattggcaagtggtgatttcagccgctttgaggtcaatggtagaaaaggaaatatcttcgtataaaaactagacagaatcattcccacaaactgcgttgtgatgtgttcgttcaactcacagagtttaacctttcttttcatagagcagttaggaaacagtctgtttgtcaattctttaagtggatattctgacatcttgtggccttcgttggaaacgggatttcttcatattctgctagacagaagaattctcagaatcttccttgtgttgtgtgtattcaactcacagagttgaacgatcctttacacagagcagacttgaaacactctttttgtgcaatttgcaagtggagatttcaaccgctttgaggtccatggtagaaaaggaaatatcttcgtataaaaactagacagaatgattctcagaaactcctttgtgatgtgtgcgttcaactcacagagtttaacctttcttttcatagagcagttaggaaacactctgtttgtaaagtctgcaagtggatattcagacctccttgacgccttcgttggaaacgggatttcttcatattatgctagacagaagaattctcagtaacttccttgtgttgggtgtattcaactgacagagttgaactttcctttagacagatcagatttgaaacactctttttgtggaatttgcaaggtgagatttcaaccgctttgaggccaaaggcagaaaaggaaatatcttcctttaaaaactagacagaatcattctcagaaactgctctgtgatgtgtgcgttcaactctcagagtttaacttttctgttcattcagcagtttgtaaacactctgtttgtaaagtctccacgtggatattttgaccacttagaggccttcgttggaaacgggtttttttcatgtaaggctagacagaagaattcccagtaacttccttgtgttgtgtgcattcaactcacagagttgaacgttcccttagacagagcagatttgaaacactctatttgtgcaatttgcaagtgtagatttcaagcgctttaaggtcaacggcagaaaaggaaatatcttggtttcaaaactagacagaatgattctcagaaacttctttgtgatgtctgcgttcaactcacagagtttaacatttcttttcatagagcagttaggaaacactctgtttgtaaagtctgcaattggatattcagacctctttgaggccttcgttggaaacgggatttcttcatactatgctagacagaagaattctcagtaacttccttgtgttgtgtgtattcaactcacagagttgaacgatcctttacacagagcagacttgtaacactctttttgtggaatttgtaagtggagatttcagccgctttgaagtcaaaggtagaaaaggaaatatcttcctataaaaactagacagaatgattctcacaaactcctttgtgatgtgtgcgttcaactcacagagtttaacctttcttttcatagagcagttaggaaacactctgtttgtaaagtctgcaagtggatattcagacatctttgaggccttcgttggaaacgggatttcttcatgttctgctagacagaagaattctcagtaacttccttgtgttgtgtgtattcaactcacagagttgaacgatcctttacacagagcagacttgtaacactctttttgtggaatttgcaagtggagatttctgccgctttgaggtcaatggtagaaaaggaaatatcttcctataaaaactacacagaatgattctcagaaactcctttgtgatgtgtgcgttcaactcacagagtttaacttttcttttcatagagcagttagcaaacactctgtttgtaaattctgcaagtggatattcagacctctttgaggccttcgttggaatcgggatttcttcaaattctgctaggcagaagaattcccagtaacttccttgtgttgtgtgtgttcaactcacagagttgaactttgatttacacagagcagatttgaaacactctttttgtggaatttgcaagtggagatttcaagcgctttgaggccagaggcagaaaaggaaatatcttcgtataaaaactagacagaatcattctcagaaactgctctgcgatgtgtgcgttcaactctcagagtttaacttttcttttcattcagcagtttggaaacactccgtttgtaaagtctgcacgtggatattttgaccacttagaggccttcgttggaaacgggtttttttcctgtaaggctagacagaagaattcccagtaacttccttgtgttgtgtacattcaactcacagagttgaacgttcccttagacagagcagatttgaaacactctttttgtgcaattggcaaatggagatttcaagcgctttaagttcaatggcagaaaaggaaatatcttcgtttcaaaactagacagaatcattcccacaaactgcgttgtgatgtgttcgttcaactcacagagtttaacctttctgttcatagagcagttaggaaacactctgtttgtaaagtctgacagtggatattctgacatcttgtggccttcgttggaaacaggatttcttcatattctgctagacagaagaattctcagtaacttccttgtgttgtgtgtattcaactcacagagtttaatgatcctttacgcagagcagacttgaaacaatctttttgtggaatttgcaagtggagatttcagccgctttgatgtcaatggtagaataggaaatatcttcctatagaaactagacagaatgattctcagaaactcctttgtgatgtgtgcgttcaactcacagagtttaacctttcttttcatagagcagttaggaaacactctgtttgtaatgtctgcaagtggatattcagacctctttgaggcctttgttggaaacgggatttcttcatattgtgctagacagaagaattcccagtaacttccttgtgttgtgtgtgttcaactcacagagttgaactttcatttacacagagcagatttgaaacactctttttgtggaatttgcaaatggaggtttcaagcgctttgaggccaaaggcagaaaaggaaatatcttcgtataaaaactagacagaaccatgctgagaaactgctctgcgatgtgtgcgttcaactctcagagtttaacttttcttttcattcagcagtttggaaacactctgtttgtaaagtctgcacgtggataacttgaccacttagaggccttcgttggaaacgggtttttttcatgtaaggctagacagaagaattcccagtaacttccttgtgttgtgtacattcaactcacagagttgaacgttcccttagacagagcagatttgaaacactctttttgtgcaattggcaaatggagatttcaagcgctttaagttcaatggcagaaaaggaaatatcttcgtttcaaaactagacagaatcattcccacaaactgcgttgcgatgtgttcgttcaactcacagagtttaacatttcttttcatagagcacttaggaaacagtctgtttgtaaattctgtaagtggatattctgacatcttgtggccttcgttggaaacaggatttcttcatattctgctagacagaagaattcccattaacttccttgtgttgtgtgtgttcaactcacagagttgaactttcatttacacagagcagatttgaaacactctttttgtggaatttgcaaatggagatttcagccgcgttgaggtcaatggtagaaaaggaaatatcttcgtttcaaaactagacagaatgattctcagaaactcctttgtgatgtgtgcgttcaactcacagagtttaacctttcttttcatagagcagttaggaaacactctgtttgtaaagtctgcaagtggatattcagacctctttgaggccttcgatggaaacgggtttttttcatataaggctagacagaagaattcccagtaacttccttgtgttgtgtgtgttcaactcacagagttgaactttcatttacacagagcagatttgaaacactctttttgtggaatttgcaaatggagatttcaagcgctttgaggccaaaggcagaaaaggaaatgtctacgtttcaaaactagacagaatcattctcagaaactgctgcttgatgtgtgcgttcaactctcagagtttaacttttcttttcattcagcggtttggaaacactctgtttgtaaagtctgcacgtggatattttgaccacttagaggccttcgttggaaacgggtttttttcatgtaaggctagacagaagaattcccagtaacttccttgtgttgtgtacattcaactcacagagttgaacgttcccttagacagagcagatttgaaacactctttttgtgcaattggcaagtggagatttcaagcgctttaaggtcaatggcagaaaaggaaatatcttcgtttcaaaactacacagaatgattctcagaaacttcattgtgatgtgtgcgttcaactcacagagtttaacctttcttttcatagagcagttgggaaacagtctgtttgtaaattctataagtggatattctgacatcttgtggccttcgttggaaacgggatttcttcatattctgctagacagaagaattctcagtaacttcgttgtgttgtgtgtattcaactcacagagttgaacgatcctttacacagagcagacttgaaacacgctttttgtggaatttgcaagtggagatttcagccgctttgaggtcaatggtagaaaaggaaatatcttcgtataaagactagacagaatgattctcagaaaatcttttgtgatgtgtgcgttcaactcacagagtttaacttttcttctcatagagcagttaggaaatactctgtttgtaaagtctgcaagtggatattcagacctctttgaggccttcgttggaaacgggatttcttcatattatgctagacagaagaattctcagtaacttccttgtgttgtgtgtattcaactgacagcgttgaactttcatttagagagagcagatttgaaacactgtttttgtggaatttgcaagtggagatttcaagcgctttggggccaaaggctgaaaaggaaatatcttcgtataaaaactagacagaaatcattctcagaaactgctgcgtgatgtgtgcgttcaaccctcagagtttaacttttcttttcattcagcggtttggaaacactctgtttgtaaagtctgcacgtggatattttgaccacttagaggccttcgttggaaacgggattttttcatgtaaggctagacagaagaattcccagtaacttccttgtgttgtgtgcattcaactcacagagttgaacgttcccttagacagagcagatttgaaacactctatttgtgcaatttgcaagtgtagttttcaagctctttaaggtcaacggcagaaaaggaaatatcttggtttcaaaactagacagaatcattcccacaaactgcgttgtgatgtgttcgttcaactcacagagtttaacctttctgttcatagagcagttaggaaacactctgtttgtaaagtctgcaagtggatattctgacatcttgtggccttcgttggaaacgggatttcttcatattctgctagacagaagaattctcagtaacttccttgtgttgtgtgtattcaactcacagagttgaacgatcctttacacagagcagacttgaaacactccttttgtggaatttgcaagtggagatttcagccgctttgaggtcaaaggtagaataggaaatatcttcctatagaaactagacagaatgattctcagaaactcctttgtgatgtgtgtgttcaactcacagagtttaacctttcttttcatagagcagttaggaaacactctgtttgtaaagtctgcaagtggatattcagacccctttgaggccttcgttggaaacgggatttcttcatattatgctagacagaagaattctcagtaacttccttctgttgtgtgtattcaactgacagagttgaactttcatttagagagagcagatttgaaacactgtttttgtggaatttgcaaatggagatttcaagcgctttggtgccaaaggcagaaaaggaaatatcttcgtataaaaactagacagaatcattctcagaaactgctgcgtgatgcgtgcgttcaactctcagagtttaacttttcttttcattcagcggtttggaaacactctgtttgtaaagtctgcaagtggatattcagacctctttgaggccttcgttggaaacgggatttcttcctattatgctcaacagaagaattcccagtaacttccttgtgttgtgtgcattcaactcacagagttgaacgttcccttagacagagcagatttgaaacactctctttgtgcaatttgcaagtgtagatttcaagcgctttatggtcaacggcagaaaaggaaatatcttcgtttcaaaactagacagaatcattcccacaaactgcgtagtgatgtgttcgttcaactcacagagtttaacctttcttttcatagagcagttaggaaacagtctgtttgtcaattctgtaagtggatattctgacatcttgtggccttagttggaaacgggatttcttcatattctgctagacagaagaattcccagtaacttccttgtgttgtgtgtattcaactcacagagttgaaagatcctttacacagagcagacttgtaacactctttttgtggaatttgcaagtggagatttcagccgctttgaagtcaaaggtagaaaaggaaatatcttcctataaaaactagacagaatgattctcagaaactcctttgtgatgtgtgcgttcaacccacagagtttaacctttcttttcatagagcagttaggaaacactctgtttgtaaagtctgcaagtggatattcagacctctttgaggccttcgttggaaaagggatttcttcatattctgctggacagaagaattccccgtaacttccttgtgttgtgtgtgttcaactcacagagttgaactttcatttacacagagcagatttgaaacactctttttgtggaatttgcaagtggagatttcaagcgctttgaggccaaaggcagaaaaggaaatatcttcgtataaaaactagacagaatcattctcagaaactgctctgtgatatgtgcgttcaactctcagagtttaacttttcttttcattcagcagtttggaaacactctgtttgtaaagtctgcacgtggatattttgaccacttagaggccttcgttggaaacgggttttttttcatgtaaggctagacagaagcattcccagtaacttccttgtgttgtgtgcattcaactcacagagatgaacgttcccttagacagagcagatttgaaacactctatttgtgctatttgcaagtgtagatttccagcgctttaaggtcaatggcagaaaaggaaatatcttcgtttcaaaactagacagaatgattctcagaaactcctttgtgatgtgtgcgttcaactcacagagtttaacttttcttttcatagagcagttaggaaacactctgtttgtaaagtgtgcaagtggatattcagacctccttgaggccttctttggaaaagggatttcttcatattatgctagacagaataattctcagtaacttccttgtgttgtgtgtattcaactcacagagttgaaggatcctttacagagagcagacttgaaacactctttttgtcgaatttgcaagtggagatttcagccgctttgaggtcaatggtagaataggaaatatcttcttatagaacctagacaaaatgattctcagaaacccctttgtgatgtgtgcgttccactcacagagtttaacctttcttttcatagagcagttaggaaacactctgtttgtaaagtctgcaaggggatatttagacctctttgaggccatcgttggaagcgggatttcttaatattctgctagacagaataattctcagtaacttccttgtgttgtgtgtattcaactgacagagttgaactttcatttagagagagcagatttgaaacactgtttttgtggaatttgcaagtagagatttcaagcgctttggggccaaaggcagaaaaggaaatatcttcgtataaaaactagacagaatcattcccacaaactgcgttgtgacgtgttcgttcaactcacagagtttaacctttcttttcatagagcagttaggaaacactctgttggtaaattctgtaagtggatattctgacatcttgtggccttcagtggaaacgggatttcttcatattctgctagacagaagaattcccagtaacttccttgtgttgtgtacattcaactcacagagttgaacgttcccttagacagagcagatttgaaacactctttttgtgcaattggcaagtggagatttcaagcgctttgaggtcaatggcagaaaaggaaatatcttcgtttcaaaactagacagaatcattcccacaaactgcgttgtgatgtgttcgttcaactcacagagtttaacctttctgttcatagagcagttaggaaacactctgtttgtaaagtctgtaagtggatattctgacatcttgtggccttcgttggaaacgggatttcttcattttctgctagacagaagaattctcagtaacttccttgtgttgtgtgtattcaactcgcagagttgaacgatcctttacacagagcagacttgaaacactctttttgtggaatttgcaagtggagatttcagccgctttgaggtcagtggtagaaaaggaaatatcttcgtataaagactagacagaatgattctcagaaactcctttgtgatgtgtgtgttcaactcacagagtttaacctttcttttcatagagcagttagtaaacactctgtttataaagtctgcaagtggatattcagacctccttgaggccttcgttggaaacgggatttcttcatattatgctagacagaagaattctcagtaacttcctcgtgttgtgtttattcaactgacagagttgaactttcatttagagagagcagatttgaaacactgtttttgtggaatttgcaagtggagatttcaagcgctttggggccaaaggcagaaaaggaaatatcttcgtataaaaactagacagaatcattctcagaaactgctgcgtgatgggtgcgttcaactctcagagtttaacttttcttttcattcagcggtttggaaacactctgtttgtaaagtctgcacgtggatattttgaccacttagaggccttcgttggaaacgggtttttttcatgtaaggctagacagaagaattcccagtaacttccttgtgttgtgtacattcaactcacagagttgaacgttctcttagacagagcagatttgaaacactctttttgtgcaattggcaaatggagatttcaagcgctttaaggtcaatggcagaaaaggaaatatcttcgtttcaaaactagacagaatcattcccacaaactgcgttgtgatgtgttcgttcaactcacagagtttaacctttctgttcatagagcagttaggaaacactctgttttgtaaagtatgcaagtggatattcagacctccttgaggccttcgttggaaacgggatttcttcatattctgctagacacgaagaattctcagtaacttccttgtgttgtgtgtattcaactcacagagttgaacgatcctttacacagagcagacttgaaacactctttttgtggaatttgcatgtggagatttcagccgctttgaggtcaatggtagaaaaggaaatatcttcgtataaaaactagacagaatgattctcataaactcctttgtgatgtgtgcgttcaactcacagagtttaacctttcttttcatagagcagttaggaaacactctgtttgtaaaatctgcaagtggatattcagacccctttgaggccttcgttggaaacgggatttcttcatattctgctagacagaagaattcccagtaacttccttgtgttgtgtgtgttcaactcacagagttgaactttcatttacacagagcagatttgaaacactctttttgtggaatttgcaagtggagatttcaagcgctttgaggccaaaggcagaaaaggaaaatatcttcgtttcaaaactagacagaatcattctcagaaactgctctgcgatgtgtacattcaactctcagagtttaatttttcttttcattcagcagtttggaaacactctctttgtaaagtctgcacgtggatattttgaccacttagaggccttcgttcgaaacgggttttattcttgtaaggctagacagaagaattcccagtaacttccttgtgttgtgtgcattcaactcacagagttgaacgttcccttagacagagcagatttgaaacactctatttgtgcaatttgcaagtgtagatttcaagcgctttaaggtcaacggcagaaaaggaaatatcttcgttttaaaactagacagaatcattcccacaaactgcgttgtgatgtgttcgttcaactcacagagtttaacctttctgttcatagagcagttaggaaacactctgtttgtaaagtctgtaagtggatattctgacatattgtggccttcgttggaaacgggatctcttcatattctgctagacagaagaattctcagtaactgccttgtgttgtgtgtattcaactcacagagttgaacgatcctttacacagagcagacttgaaacactccttttgtggaatttgcaagtggagatttcagccgctttgaggtcaatggtagaataggaaatatcttcctgtagaaactagacagattgattctcagaaactcctttgtgatgtgtgcgttcaactcacagagtttaacctttcttttcatagagcagttaggaaacactctgtttgtaaagtctgcaagtggatattcagacctccttgagaccttcgttggaaacgggatttcttcctattatgctagacagaagaattcccagtaacttccttgtgttgtgtgtgttcaactcacagagttgagctttcatttacacagagcagatttgaaacactctttttgtggaatttgcaaatggagatttcaagcgctttgaggccaaaggcagaaaaggaaatatcttcgtataaaaactagacagaatcattctcagaaactgctctgtgatgtgtgcgttcaactctcagagtttaacttttcttttcattcagcagtttggaaacactctgtttgtaaagtctgcacgtggataattttaccacttagaggccttcgttggaaacgggtttttttcatgtaaggctagacagaagagttctcagtaacttccttgtgttgtgtgtattcaactcacagagttgaacgatcctttacacagagcagacttgtaacactctttttgtggaatttgcaagtggagatttcagccgctttgaagtcaaagtagaaaaggaaatatcttcctataaaaactagacagaatcattcccacaaactgcgttgtgatgtgttcgttcaactcacagagtttaaactttctgttcatagagcagttaggaaacactctgtttgtaaagtctgcaagtggatattcagacctccttgaggccttcgttggaaacgggatttcttcatattctgctagacagaagaattctcagtaacttccttgtgttgtgtgtattcaactcacagagttgaacgatcctttacagagagcagacttgaaacactctttttgtggaatttgcaagtggagatttcagccgctttgaggtcaatagtagaaaaggaaataacttcgtagaaaaactagacagaatgattctcagaaactcctttgtgatgtgtgtgttcaactcacagagtttaacctttcttttcatagagcagttagtaaacactctgtttataaagtctgcaagtggattttcagacccctttgaggccttcgttggaaacgggatttcttcatattatgctagacagaagaattcccagtaacttccttgtgttgtgtgtgttcaactcacagagttgaactttgatttacacagagcagatttgaaacactctttttgtggaatttgcaagtggagatttcaagcgctttgaggccaaaggcagaaaaggaaataccttcgtataaaaactagacagaatcattctcagaaactgctctgtcatgtgtgcgttcaactctgagagtttaaattttcttttcattcagcagtttggaaacactctgtttgtaaagtctgcacgtggatattttgaccacttagaggccttcgttggaaacgggtttttttcatgtaaggctagacagaagaattcccagtaacttccttgtgttgtgtgcattcaactcacagagttgaacgttcccttagacagagcagatttgaaacactctatttgtgcaatttgcaagtgtagttttcaagctcttttaggtcaacggcagaaaaggaaatatcttggtttcaaaactagacagaatcattcccacaaactgcgttgtgatgtgttcgttcaactcacagagtttaacctttctgttcatagagcagttaggaaacactctgtttgtaaagtctgtaagtggatattctgacatctggtggccttcgttgggaacgggatttcttcatattctgctagacagaagaattctcagtaacttccttgtgttgtgtgtattcaactcacagagttgaacgatcctttacacagagcagacttgaaacactctttttgtggaatttgtaagtggagatttcagccgctttgaggtcaatggtagaataggaaatatcttcctatagaaactagacagaatgattctcagaaactcctttgtgatgtgtactttcaactcacagagtttaacctttcttttcatagagcagttaggaaacactctgtttgtaaagtctgcaagtggatattcagacctctttgaggccttcgttggaaacgggtttttttcatataaggctagacagaagaattctcagtaacttccttgtgttgtgtgtattcaactgacagagttgaactttcatttagagagagcagatttgaaacactgtttttgtggaatttgcaagtggagatttcaagcgctttggggccaaaggcagaaaaggaaatatcttcggataaaaactagacagaatcattctcagaaactgctgcgtgatgtgtgtgttcaactctcagagtttaacttttcttttcattcagcggtttggaaacacactgtttgtaaagtctgcacgtggatattttgaccacttagaggccttcgttggaaacgggttttttgcatgtaaggctagacagaagaattcccagtaacttccttgtgttgtgtacattcaactcacagagttgaacgttccccttagacagagcagatttgaaacactctttttgtgcaattggcaagtggagatttcaagcgctttaaggtcaatggcagaaaaggaaatatcttcgtttcaaaactagacagaatgattctcagaatctcctttgtgatgtgtgcgttcaactcacagagtttaacctttcttttcatagagcagttaggaaacactctgtttgtaaagtctgcaagtggatattcagacatccttgaggctttcgttggaaacgggatttcttcatattctgtttgaaagaagaattctcagtaacttccttgtgttgtgtgtattcaagtcacagagttgaacgatcctttacacagagcagacttgaaacactctttttgtggaatttgcaagtggagatttcagccgctttgaggtcaatggtagaataggaaatatcttcctatagaaactagacagagtgattctcataaactcctttgtgatgtgtgcgttcaactcacagagtttaacctttcttttcatagagcagttaggaaacactctgtttgtaaagtctgcaagtggatattcagacctccttgaggccttcgttggaaacgggatttcttcatattctgctagactgaagaattctcagtaacttccttgtgttgtgtgtattcaactcacagagttgaacgatcctttacacagagcagacatgaaacactctttttgtggaatttgcaagtggagatttcagccgctttgaggtcaatggtagaataggaaatatcttcctatagaaactagacagaatgattctcagaaactcctttgtgatgtgtgcgttcaactcacagagttcaacctttcttttcatagagcagttaggaaacactctgtttgtaaagtctgcaagtggatattcagacctctttgaggccttcgttggaaacgggatttcttcatattatgctagacagaagaattctcagtaacttccttgtgttgtgtgtattcaactcacagagttgaacttccatttacacagagcagatttgaaacactctttttgtggaatttgcaagtggagatttcaagcgctttgaggccaaaggcagaaaaggaaatatcttcgtttcaaaactagacagaatcattctcagaaactgctctgcgatgtgtgcgttcaactctcagagtttaacttttcttttcattcagcagtttggaaacactctgtttgtaaagtctgcacgtggataatttgaccacttagaggccttcgttggaaacgggtttttttatgtaaggctagacagaagaattcccagtaacttccttgtgttgtgtacattcaactcacagagttgaacgttcccttagacagagcagatttgaaacactctttttgtgcaattggcaagtggagatttcaagcgctttgaggtcaatggcagaaaaggaaatatcttcgtttcaaaactagacagaatcattcccaaaaactgcgttgtgatgtgttcgttcatctcacagagtttaacctttcttttcatagagcagttaggaaacagtctgtttgaaaattctgtaagtggatattctgacatcttgtggccttcgttggaaacgggatttcttcatattctgctagacagaagaattctcagtaacttccttgtgttgtgtgtattcaactcacagagttgaacgatcctttacacagagcagacttgaaacactctttttgtggaatttgcaagtggagatttcagccgctttgaggtcaatagtagaaaaggaaatatcttcgtaggaaaactagacagaatgattctcagaaactcctttgtgatgtgtgcgttcaactcaaagagtttaacttttcttttcatagagcagttaggaaacactctgtttgtaaagtctgcaagtggatattcagacctctttgaggccttcgttggaaacgggatttcttcatattatgctagagagaagaattctcagtaacttccttttgttgtgtgtattcaactgacagagttgaactttcatttagacagagcagatttgaaacactctttttctggaatttgcaggtggagatttcaagcgctttgaggccgaaggcagaaaaggaaatatcttcgtataaaaactagacagaatcattctcagaaactgctctgcgatgtgtgccttcagcgctcagagtttaacttttcttttcattcagcagtttggaaacactctgtttgtaaagtctgcacgtggatattttgaccacttagaggccttcgttggaagcgggtttttgtcatgtaaggttagacagaagaattcccagtaacttccttgtgttgtgtgcattcaactcacagatttgagcgttcccttagacagagcagatttaaaacactctatttgtgcaatttgcaagtgtagatttcaagcgctttaaggtcaatggcagaaaaggaaatatcttcgtttcaaaactagacagaatcattcccacaaactgcgttgtgaggtgttccgtaaactcacagagtttaacctttcttttcatagagcagttaggaaacagtctgtttgtaaattctgtaagtggatattctgacatcttgtggccttcgttggaaacgggatttcttcatattctgctagacagaagaattctcagtaacttccttgtgttgtgtgtattcaactcacagagttgaacgatcctttacacagagcagacttgaaacactctttttgtggaatttgcaaatggagatatcagccgctttgaggtcaatggtagaataggaaatatcttcctatagaaactagacagaatgattctcagaaactcctttgtgatgtgtgcgttcaactcacagagtttaacctttcttttcatagagcagttaggaaacactctgtttgtaaagtctgcaagtggatattcagacctccttgaggctttcgttggaaacgggatttcttcatattctgctagaaagaagaattcccagtaacttccttgtgttgtgtgtgttcaactcacagagttgaactttcatttacacagagcagatttgaaacactctttttgtggaatttgcaagtggagatttcaagcgatttgaggccaaaggcagaaaaggaaatatcttcgtttcaaaactagacagaatcattctcagaaactgctctgcgatgtgtgcgttcaactctcagagtttaacttttcttttcattcagcagtttgaaaacactctgtttgtaaagtctgcacgtgtatattttgaccacttagaggccttcgttggaaacgggtttttttcctgtaaggctagacagaagaattcccagtaacttcccttgtgttgtgtgcattcaactcacagagttgaacgttcccttagacagagcagatttgaaacactctatttgtgcaatttgcaagtgtagttttcaagctctttaaggtcaacggcagaaaaggaaatatcttcgtttcaaaactagacagaatcattctcacaaactgcgttgtgatgtgttcgttcatctcacagagtttaacctttcttttcatagagcagttaggaaacagtctgtttgtaaattctgtaagtggatattctgacatcttgtggccttcgttggaaacgggatttcttcatattctgctagacagaagaattctcagtaacttccttgtgttgtgtgtattcaactcacagagttgaacgatcctttacactgagcagacttgaaacattctttttgtggaatttgcaagtggagatttcagccgctttggggtcaatggtagaataggaaatatcttcgtagaaaaactagacagaatgattctcagaaacttctttgtgatgtgtgcgttcaactcacagagtttaacctttcttttcatggagcagttaggaaacactctgtttgtaaactctgcaagtggatattcagacctctttgaggccttcgttggaaacgggatttcttcatactatgctagacagaagacttctcagtaacttccttgtgttgtgtgtattcaactcacagagttgaacgatcctttacacagagcggacttgaaacactctttttgtggaatttgcaagtggagatttcagccgcgttgaggtcaatggtagaaaaggaaatatcttcttataaaaactagacagaatgattctcagaatctcctttataatgtgtgcgttcaactcacagagtttaacctttcttttcataaagcagttaggaaacactctgtttgtaatgtctgcaagtggatattcagacctctttgaggccttcgttggaaacgggatttcttcatattctgctagacagaagaattcccagtaacttccttgtgttgtgtgtgttcaactcacagagttgaactttcatttacacagagcagatttgaaacactctttttgtggagtttgcatgtggagatttcaagcactttgaggccaaaggcagaaaaggaaatatcttcgtataaaaactagacagaatcattctcagaaactgctgcgtgatgtgtgtgttcaaccctcagagtttaactttccttttcattcagcggtttggaaacactctgtttgtaaagtctgcacgtggatattttgaccacttagaggccttcgttggaaacgggtttttttcatgtaaggctagacagaagaattcccagtaacttccttgtgttgtgtgcattccactcacagagttgaacgttcccttagacagagcagatttgaaacactctatttgtgcaatttgcaagtgtagatttcaagctctttaaggtcaatggcagaaaaggaaatatcttcgtttcaaaactagacagaatcattcccacaaactgcgttgtgatgtgttcgttcaactcacagagtttaacctttctgttcatagagcagttaggaaacactctgtttgtaaagtctgtaagtggatattctgacattttgtggccttcgttggaaatgggatttcttcatattctcctagacagaagaattctcagtaacttccttgtgctgtgtgtattcaactcacagagttgaacgatcctttacacagagcatacttgaaacactcttcctgtggaatttgcaactggagatttcagccgctttgaggtcaatggtagaataggaaatatcttcgtataaaaactagacagaatgattctcagaaactcctttgtgatgtgtgtgttcaactcacagagtttaacctttcttttcatagagcagttagtaaacactctatttataaagtctgcaagtggatattcagacccctttgaggccttcgttggaaacgggatttcttcatattatgctagacagaagaattctcagtaacttccttgtgttgtgtgtattcaactgacagagttgaactttcattttgagagagcagatttgaaatactgtttttgtggaatttgcaagtggagatttcaaacgctttggggccaaaggcagaaaaggaaatatcttcgtataaaaactagacagaatcattctcagaaactgctgtgtgatgtgtgcgttcaactctcagagtttaacttttcttttcattcagcggtttggaaacactctgtttgtaaagtctgcacgtggatattttgatcacttagaggccttcgttggaaacgggattttttcatgtaaggctagacagaagaattcccagtaacttccttgtgttgtgtgcattcaactcacagagttgaacgttcccttagacagagcagatttgaaacactctatttgtgcaatttgcaagtgtagatttcaagcgctttaatgtcaatggcagaaaaggaaatatcttcgtttcaaaactagacagaatgattctcagaaacccctttgtgatgtgtgcgttcaactcacagagtttaacctttctgttcatagagcagttaggaaacactctgtttgtaaagtctgtaagtggatattctgacatgcttgtggccttcgttggaaacgggatttcttcatattctgctagacagaagaattctcagtaacttccttgtgttgtgtgtattcaactcacagaattgaacgatcctttacacagagcagacttgaaacactctttttgtggaatttgcaagcggagatttcagccgctttggggtcaatggtagaaaaggaaatatcttcgtataaagactagacagaatgattctcagaaactcctttgtgatgtgtgcgttcaactcacagagtttaacctttcttttcatagagcagttaggaaacactctgtttgtaaagtctgcatgtggatattcagacctctttgaggccttcgttggaaacgggtttttttcatataaggctagacagaagaattctcagtaacttccttgtgttgtgtgtattcaactgacatagttgaactttcatttagagagagcagatttgaaactctgtttttgtggaatttgcaagtggagatttcaagcgctttggggccaaaggcagaaaaggaaatatcttcgtataaaaactagacagaatcattctcagaaactgctctgcgatgtgtgccgttcaactctcagagtttaacttttcttctcattcagcagtttggaaacactctgtttgtaaagtctgcacgtggataatttgaccacttagaggccttcgttggaaacgggtttttttcatgtaaggctagacagaagaattcccagtaacttcccttgtgttgtgtgcattcaactcacagagttgaacgttcccttagacagagcagatttgaaacactctatttgtgcaatttgcaagtgtagttttcaagctctttaaggtcaacggcagaaaaggaaatatcttcgtttcaaaactagacagaatgattctcagaaactcctttgtgatgtgtgagttcaactcacagagtttatcctttcttttcatagagcagttaggaaacactctgtttgtaaagtctgcaagtggatattcagacctctttgaggccttcgttggaaacgggatttcttcatattctgctagacagaagaattctcagtaacttccttgtgttgtgtgcattgaactcacagagttgaacgatcctttacacagggcagacttgaaacactctttttgtggagtttgcaagcggagatttcagcctctttgaggttaatggtagaaaatgaaatatcttcgtatagaaactagacagaatgattctcagaaactcctttgtgatgtgtgcgttcaactcacagagtttaacctttcttttcacagagcagttaggaaacactctgtttgtaaagtttgcaagtggatattctgacatccttgaggccttcgttggaaacgggatttcttcatattatgctacacagaagaattctcaataacttccttgtgttgtgtgtattccaatcacagagttgaacgatcctttacacagagcagacttgaaacactgtttttgtggaatttgcaagtggagatttcagccgctttgaggtcaatggttgaaaaggaaatatcttccaatagaaatttgacagaatgattctcagaaactcctttgtgatgtgtgcgttcaactcacagagtttaacctttcttttcatagagcagttaggaaacactctgtttgtaaagtctgcaagtggatattcagacatctttgaggccttcgttggaaacgggatttcttcatattatgttagacagaagaattctcagtaactttcttgtgttgtgtgtattcaactgacagagttgaactttcatttagagagagcagatttgaaacactgtttttgtggaatttgcaagtggagatttcaagcgctttggggccaaaggcagaaaaggaaatatcttcgtataaaaactggacagaatcattctcagaaactgctgcgtgatgtgtgcgttcaactctcagagtttaacttttcttttcattcagcggtttggaaacactctgtttgtaaagtctgcacgtggatattatgaccacttagaggccttcgttggaaacgggttttcttcatgtaaggctagacagaagaattcccagtaacttccttgtgttgtgtgcattcaactcacagagttgaacgttcccttagacagagcagatttgaaacactccatttgtgcaatttgcaagtgtagatttcaagcgctttaaggtcaatggcagaaaaggaaatatcttcgtttcaaaactagacagaatcattcccacaaactgcgttgtgatgtgttcgttcaactcacagagtttaacctttcttttcatagagcagttaggaaacactctgttggtaaattctgtaagtggatattctgacatcttgtggccttcagtggaaacgggattttttcatattctgctagacagaataattctcagtaacttccttgtgttgtgtgtattcaactcccagagttgaacgatcctttacacagagcagacttgaaacattctttttgtggaatttgcaagtggagatttcagccgctttgaggtcaatggtagaataggaaatatcttcctatagaaactagacagaatgattctgagaaactcctttgtgatgtgtgcgttcaactcacagagtttaacctttcttttcatagagcagttaggaaacactctgtttgtaaagtgtgcaagtggatattcagacctccttgaggccttcgttggaaacgggatttcttcatattatgctagacagaagaattcccagtaacttccttgtgttgtgtgtgttcaactcacagagttgaactttcatttacacagagcagatttgaaacactctttttgtggaatttgcaaatggagatttcaagcgctttcaggccaaaggcagaaaaggaaatatcttcgtataaaaactagacagaatcattctcagaaactgctgcgtgatgtgtgcgttcaactctcagagtttaacttttctttacattcagcggtttggaaacactctgtttgtaaagtctgcacgtggaaattttgaccacttagaggccttcgttggaaacgggtttttttcatgtaaggctagacagaagaattcccagtaacttccttgcgttgtgtacattccactcacagagttgaacgttcccttagacagagcagatttgaaacactctttttgtgcaattggcaagtggtgatttcagccgctttgaggtcaatggtagaaaaggaaatatcttcgtataaaaactagacagaatcattcccacaaactgcgttgtgatgtgttcgttcaactcacagagtttaacctttctgttcatagagcagttaggaaacactctgattgtaaagtctgtaagtggatattctgacatcttgtggccttcgttggaaacgggatttcttcatattctgctagacagaagaattctcagtaacttccttgtgttgtgtgcattcaactcacagagttgaatgatcctttacacagagcacattagaaacactctttttgtggaatttgcaagtggagatttcagccgctttgaggtcaatggcagaaaaggaaatatcttcgtataaaaactagacagaatgattctcagaaactcctttgtgatgtgtgcgttcaactcacagagtttaacctttcttttcatagagcagttaggaaacactctgtttgtaaagtctgcaagtggatattcagacctctttgaggctcttcgttggaaacgggtttttttcatataaggctagacagagcaattctcagtaacttccttgtgttgtgtgtattcaactgacagagttgaactttcatttagagagagcagatttgaaacactgtttttgtggaatttgcaagtggagatttcaagcgctttggggccaaaggcagaaaaggaaatatcttcgtataaaaactagacagaatcattctcagaaactgctgcgtgatgtgtgcgttcaactctcagagtttaacttttcttttcattcagcggtttggaaacactctgtttgtaaagtctgcacgtggatattttgaccacttagaggcctttgttggaaacgggtttttttcatgtaaggctagacagaagaattcccagtaacttccttgtgttgtgtgcattcaactcacagagttgaacgttcccttagacagagcagatttgaaacactctatttgtgcaatttgcaagtgtagatttcaagcgctttaaggtcaatggcagaaaaggaaatttcttcgtttcaaaactagacagaatgattctcagaaaatcttttgtgatgtgtgcgttcaactcacagagtttaacttttcttctcatagagcagttaggaaacattctgtttgtaaagtgtgcaagtggatattcagacttctttgaggccttcgttggaaacgggatttcttcatattatgctagacagaataattctcagtaacttccttgtgttgtgtgtattcaactcacagagttgaaggatcctttacagagagcaggcttgaaacactctttttgtggaatttgcaagtggagatttcagccgctttgaggtcaatggtagaataggaaataccttcttatagaaactagacagaatgattctcagaaactcctttgtgatgtgtgcgttcaactcacagagtttaacctttctgttcatagagcagttaggaaacactctgtttgtaaagtctgcaagtggatattcagacctccttgattccttcggtggaaacgggatttcttcatattatgctagacagaagaattctcagtaacttccttgtgttgtgtgtattcaactcacagagttgaacgatcctttacagagagcagacttgaaacactctttttgtggaatttgtaagtggagatttcagccgctttgaggtcaatggttgaaaaggaaactatcttcgtataaagactagacagaatgattctcagaaactcctttgtgatgtgtgcgttcaactcacagagtttaacctttcttttcatagagcagttaggaaacactctgtttgtaaagtctgcaagtggatattcagacctctttgaggccttcgttggaaacgggtttttttcatataaggctcgacagaagaattctcagtaacttccttgtgttgtgtgtattcaactgaaagagttgaactttcatttagagagagcagatttgaaacactgtttttgtggaagttgcaagtggagatttcaagcgctttggggccaaaggcagaaaaggaaatatcttcgtataaaaactagacagaatcattctcagaaactgctgcgtgatgtgtgcgttcaactctcagagtttaacttttcttttcattcagccgtttggaaacactctgtttgtaaagtctgcacgtggatattttgaccacttaggggccttcgttggaaacgggttttttgcatgtaaggctagacagaagaattcccagtaacttccttgtgttgtgtgcattcaactcacagagttgaacgttcccttagacagagcagatttgaaacactctatttgtgcaatttgcaagtgtagatttcaagcgctttaaggtcaacggcagaaaaaggaaatatcttcgtttcaaaactagacagaatcattcccacaaactgcgttgtgatgtgttcgttcaactcacagagtttaacctttcttttcatagagcagttaggaaacagtctgtttgtcaattctgtaagtggatattctgacatcttgtggccttcgttggaaacgggatttcttcacattctcctagacagaagaattctcagtaacttccttgtgttgtgtgtattcaactcacagagttgaacgatcctttacacagagcagacttgtaacactctttttgtggaatttgcaagtggagatttcagccgctttgaagtcaaatgtagaaaaggaaatatcttcctataaaaactagacagaatgattctcagaaacttctttgtgatgtgtgtgttcaactcacagagtttaacctttcttttcatagagcagttaggaaacactctgtttgtaaactctgcaagtggatattcagacctctttgaggacttcgttggaaacgggtttttttcatataaggctagacagaagaattcccagtaactttccttgtgttgtgtgtgttcaactcacagagttgaactttcagttacacagagcagatttgaaacactctttttgtggactttgcaaatggagatttcaagcgctttgaggccaaaggcagaaatggaaatatgcttcgtataaaaactagacagaatcattctcagaaactgctctgcgatgtgtgcgttcaagtctcagagtttaacttttcttttcattcagcagtttggaaacactctctttgtaaagtctgcaggtggatattttgaccacttagaggccttcgttggaaacgggtttttttcctgtaaggctagacagaagaattcccagtaacttccttgtgttgtgtgcattcaactcacagagttgaacgttcccttaggcagagcagataggaaacactctatttgtgcaatttgcaagtgtagatttcaagcgctttaaggtcaacggcagaaaaggaaatatcttcgtttcaaaactagacagaagaattctcagtaacttccttgtgttgtgtgtattcaactcacagagatgaacgatcctttacacagagcagacttgaaacactctttttgtggaatttgcaactggagatttcagccgctttgaggtcaatagtagaaaaggaaataacttcgtagaaaaactagacagaatgattctcagaaactcctttgtcatgtgtgtgttcaactcacagagtttaacctttcttttcatagagcagttagtaaacactctgtttataaagtctgcaagtggatattcagacccctttgaggccttcgttggaaacgggatttcttcatattatgctagacagaagaattcccagtaacttccttgtgttgtgtgtgttcaactcacacagttgaactttcgtttacacagagcagatttgaaacactctttttgtggaatttgcaaatggagatttcaagcgctttgaggccaaaggcagaaaaggaaatatcttcgtataaaaactagacagaatcattctcaaaaactgctctgcgatgtgtgcgttcaactctcagagtttaacttttcttttcattcagcagtttggaaacactctgtttgtaaagtctgcacgtggatattttgaccacttagaggccttcgttggaaacgggtttttttcctgtaaggctagacagaagaattcccagtaacttccttgtgttgtgtacattcaactcacagagttgaacgttcccttagacagagcagatttgaaacactctttttgtgcaattggctaatggagatttcaagcgctttaaggtcaatggcagaaaaggaaatatcttcgtttcaaaactagacagaatcattcccacaaactgcgttgtgatgtgttcgttcaactcacagagttgaacctttcttttcatagagcagttaggaaacagtctgtttgtcaattctgtaagtggatattctgacatcttgtggccttcgttggaaacgggatttcttcatattctgctagacagaagaattctcagaatcttccttgtgttgtgtgtattcaactcacagagttgaacgatcctttacacagagcagacttgaaacactctttttgtggaatttgcaagtggagatttcagccgctttgaagtccatggtagaaaaggaaatatcttcgtataaaaactagacagaatgattctcagaaactcctttgtgatgtgtgcgttcaactcacagagtttaacctttctgttcatagaggtgttaggaaacactctgtttgtaaagtctgcaagtggatattcagacctccttgaggccttcgttggaaacgggatttcttcatattctgctagacagaagaattctcagtaacttccttgtgttgtgtgtattcaactgacagagttgaactttcatttagagagagcagatttgaaacactgtttttgtggagtttgcaagtggagatttcaagcgctttggggccaaaggcagaaaaggaaatatcttcgtataaaaactagacagaatcattctcagaaactgctgcgtgatgtgtgcgttcaactctcagagtttaacttttcttttcattcagcggtttggaaacactctgtttgtaagtctgcacgtggatattttgaccacttagaggctttcgttggaaacgcgtttttttcatgtaaggctagacagaagaattcccagtaacttccttgtgttgtgtgcattcaactcacagtgttgaacgttcccttagacagagcagatttgaaacactctatttgtgaatttgcaagtgtagatttcaagcgctttaaggtcaatggcagaaaaggaaatatcttcgtttcaaaactagacagaatcattcccacaaactgcgttgtgatgtgttcgttcaactcacagagtttaacttttctgttcatagagcagttaggaaacactctgtttgtaaagtctgaaagtggatattctgacatcttgtggccttcgtttgaaacgggatttcttcatattctgctagacagaagaattctcagtaacttccttgtgttgtgtgtattcaactcacagagttgaacgatcctttacacagaacagacttgtaacactctttttgtggaatttgcaagtggagatttcagccactttgaagtcaaaggtagaaaaggaaataacttcctataaaaactagacagaatgattctcagaaactcctttgtgatgtgtgcgttcacctcacagagtttaacttttcttttcatagagcagttaggaaacactctgtttgtaaagtctgcaagtgtatattcagacctctttgaggccttcgttggaaacgggatttcttcatattatgctagacagaagaattcccagtaacttccttgtgttgtgtgtgttcaactcacagagttgaactttcatttacacagagcagatttgaaacactctttttgtggaatttgcaagtggagatttcaagcgctttgaggccaaaggcagaaaaggaaatatcttcgtttgaaaactacacagaatcattctcagaaactgctgcgtgatgtatgcgttcaactctcagagtttaacttttcttttcattcagcggtttggaaacactctgtttgtaaagtctgcacgtggatattttgaccacttagaggccttcgttggaaacgggtttttttcatgtaaggctagacagaagaattcccagtaacttccttgtgttgtgtgcattccactcacagagttgaacgttcccttagacagagcagatttgaaacactctatttgtgcaatttgcaagtgtagatttcaagcgctttaaggtcaatggcagaaaaggaaatatcttcgtttcaaaactagacagaatcattcccacaaactgcgttgtgatgtgttcggttcaactcacagagtttaacctttctgttcatagagcagttaggaaacactctgtttgtaaagtctgtaagtggatattctgacatcttgtggccttcgttggaaacgggatttcttcatattatgctagaaagaagaattctcagaaacttccttgtgttgtgtgttttcaactcacagagttgaacgatgctttacacagagtagacttgaaacactctttttgtgtaatttgcaagtggagatttcagccgcattgaggtcaatggtagaaaaggaaatatcttcgtttaaaaactagacagaataattctcagaaacttcattgtgatgtgtgcgttcaactcacagagtttaacctttcttttcatagagcagttaggaaacactgtttgtaaactctgcaagtggatattcagacctctttgaggccttcgttggaaacgggatttcttcatactgtgctagacagaagaattctcagtaatttccttgtgttgtgtgtattcaactcacagagttgaacgatcctttacacagagcagacttgaaacactcttcttgcggaatttgcaagtggagatttcagccgctttgaggtcaatggtagaataggaaatatcttcctatagaaactagacagaatgattctcagaaactcctttgtgatgtgtgcgttcaactcacagagtttaacctttcttttcatagagcagttgggaaacactctgtttgtaaagtctgcaagtggatattcagacctctttgaggccttcgttggaaacgggatttcttcatattctgctagacagaagaattcccagtaacttccttgtgctgtgtgtgttcaactcacagagttgaactttcatttacacagagcagatttgaaacactctttttgtggaatttgcaagtggagatttcaagcgctttgaggccaaaggcagaaaaggaaatatcttcgtataaaaactagacagaatcatgctgagaaactgctctgcgatgtgtgcgttcaactctcagagtttaacttttcttttcattcagcagtttggaaacactctgtttgtaaagtctgcacgtgcataatttgaccgcttagaggccttcgttggaaacgggtttttttcatgtaaggctagacagaagaattcccagtaacttccttgtgtagtgtgcattcaactcacagagttgaacgttcccttagacagagcagatttgaaacactatatttgtgcaaattgcaagtgtagatttcaagtgatttaaggtcaatggcagaaaaggaaatatcttcgtttcaaaactagacagaatcattcccacaaactgcgttgtgatgtattcgttcaactcacagagtttaacctttctgttcatagagcagttaggaaacactctgtttgtaaagtctgcaagtggatattcagacctctttgaggccttcgttggaaacgggatttcttcatattatgctagacaaaagaattctcagtaacttccttgtgttgtgtgtattcaactcacagagttgaaggatcctttacacagagcagacttgaaacactctttttgtggaatttgcaagtggagatttcagccgctttgaggtcaatggtagaataggaaatatcttcctatagaaactagacagaatgattctgagaaactcctttgtgatgtgtgcgttcaactcacagagtttaacctttcttttcatagagcagttaggaaacactctgtttgtaatgtgtgcaagtggatattcagacctccttgaggccttcgttggaaacgggatttcttcatattatgctagacacaagaattctcagtaacttcattgtgttgtgtgttttcaactgacagagttgaactttcatttagagagagcagatttgtaacactgtttttgtggaatttgcaagtggagatttcaagcgctttggggccaaaggcagaaaaggaaatatcttcgtataaaaactagacagaatcattctcagaaactgctctgcgatgtgtgcgttcaactctcagaatttaacttttcttttcattcagcagtttggaaacactctgtttgtaaagtctgcacgtggataatttgaccacttagaggccttcgttggaaacgggtttttttcatgtaaggctagacagaagaattcccagtaacttccttgtgttgtgtacattcaactcacagagttgaacgtttccttagacagagcagatttgaaacactctttttgtgcaattggcaagtggagatttcaagcgctttgaggtcaatggcagaaaaggaaatatcttcgtttcaaaactagacaaaatcattcccacaaactgcgttgtgatgtgttcgttcaactcacagagtttaacctttctgttcatagagcagttaggaaaaactctgtttgtaaagtctgtaagtagatattctgacatcttgtggccttctttggaaaagggatttcttcatattctgctagacagaagaattctcagtaactttccttgtgttgtgtttattcaactcacagagttgaatgatcctttacacagagcagacttgaaacactctttttgtggaatttgcaagtggagatttcagccgctttgaggtcaatggtagaaaagtaaatatcttcctataaagactagacagaatgattctcagaaactcctttgtgatgtgtgtgttcaactcacagagtttaacctttcttttcctagagcagttagtaaacactctgtttataaagtctgcaagtggatattcagacccctttcaggccttcgttggaaacgggatttcttcatattatgctagacagaagaattcccagtaacttccttgtgttgtgtgtgttcaactcacagagttgaactttcatttacacagagcagatttgaaacactctttttgtggaatttgcaagtggagatttcaagcgctttgaggccaaagcagaaaaggaaatatcttcgtttcgaaactagacagaatcattctcagaaaatgctctgtgatgtgtacgttcaactctcagagtttaacttttgttttcattcagcagtttggaaacactctgtttgtaaagtctgcacgtggatattttgaccacttagaggccttcgttggaaacgggtttttttcatgtaagggtagacagaagaattctcagtaacttccttgtgttgtgtgtattcaactcacagagttgaacgatcctttacacagagcagacttgtaacactctttttgtggaatttgcaagtggagacttcagccgctttgaagtcaaaggtagaaaaggaaatatcttcctataaaaactagacagaatcattcccacaaactgcgttgtgatgcgttcgttcaactcacatagtttaacctttctgttcatagagcagttaggaaacactctgtttgtaaagtctgcaagtggatattcagacctccttgaggccttcgttggaaacgggatttcttcatattctgctagacagaagaattctcagtaacttccttgtgttgtgtgtattcaactcacagagttgaacgatcctttacacagagcagacttgaaacactcgatttgtggaatttgcaagtggagatttcagccgctttgaggtcaatggtagaaaaggaaatatcttcgtataaaaactagacagaacgattctcagaaactcctttgtgatgtgtgtgttcaactcacagagtttaacctttcttttcatagagcagttagtaaacactctgtttataaagtctgcaagtggatattcagacccctttgaggccttcgttggaaacgggatttcttcatattatgctagacagaagaattctcagtaacttccttgtgttgtgtgtattcaactcacagagtcgaacgatcctttacgcagagcagacttgaaacactctttttgtggaatttgcaagtggagatttcagccgctttgaggtcaatggtagaaaaggaaatatcttcgtataaagactagacagaatgattctcagaaactcctttgtgatgtgtgcgttcaactcacagagtttaacctttcttttcatagagcagttaggaaacactctgtttgtaaagtctgcaagtggatattcagacctctttgaggccttcgttggaaacgggatttcttcatattctgctagagagaagaattctcagtaacttccttgtgttgtgtgtattcaactgacagagttgaactttcatttagagagagcagatttgaaacactgtttttgtggaatttgcaaatggagatttcaagcgctttggggccaaaggcagaaaaggaaatatcttcctataaaaactagacagaatcattctcagaaactgctgcgtgatgtgtgcgttcaactctcagagtttaacttttcttttcattcaacggtttggaaacactctctttgtaaagtctgcacgtggaaattttgaccacttagaggccttcgttggaaacgggtttttttcatgtaaggctagacagaagaattcccagtaacttccttgtgttgtgtgcattcaactcacagagttgaacgttcccttagacagagcagatttgaaacactctatttctgcaatttgcaagtgtagttttcaagctctttaaggtcaacggcagaaaaggaaatatcatcgtttcaaaactagacagaatcattcccacaaactgcgttgtgatgttttcgttcaactcacagagtttaacctttcttttcatagagcagttaggaaacagtctgtttgtcaattctgtaagtggatattctgacatcttgtggccttcgttggaaacgggatttcttcatattctgctagacagaagaattctcagaatctttccttgtgttgtgtgtattcaactcacagagttgaacgatcctttacacagagcagacttgaaacactctttttgtggaatttgcaagtggagatttcagccgctttgaagtccatggtagaaaaggaaatatcttcgtataaaaactagacagaatgattctcagaaactcctttgtgatgtgtgcgttcaactcacagagtttaacctttcttttcatagagcagttaggaaaccctctgtttgtaaagtctgcaagtggatattcagacctctttgaggccttcgttggaaacgggatttcttcatattctgctagacagaagaattctcagaatcttccttgtgttgtgtgtattcaactcacagagttgaacgatcctttacacagagcagacttgaaacactctttttgtggaatttgcaagtggagatttcagccgctttgaggtccttggtagaaaaggaaatatcttcgtataaaaactagacagaatgattctcagaaactcctttgtgatgtgtgcgttcaactcacagagtttaacctttcttttcatagagcagttaggaaacactctgtttgtaaagtctgcaagtggatattcagacctctttgaggccttcgttggaaacgggtttttctcatataaggctagacagaagaattctcagtaacttccttgtgttgtgtgtattcaactgacagagttgaactttcatttagagacagcagatttgaaacactgtttttgtggaatttgcaagtggagatttcaagcgctttggggccaaaggcagaaaaagaaatatcttcgtataaaaactagacagaatcattctcagaaactgctgcgtgatgtgtgcgttcaactctcagagtttaacttttcttttcattcagcggtttggaaacactctgtttgtaaagactgcacgtggatattttgaccccttagaggccttcgttggaaacgggtttttttcatgtaaggctagacagaagaattcccagtaacttccttgtgttgtgtgcattcaactcacagagttgaacgtacccttagacagagcagatttgaaacactctatttgtgcaatttccaagtgtagatttcaagcgctttaaggtcaacggcagaaaaggaaatatcttcgtttcaaaactagacagaatcattcccacaaactgcgttgtgatgtgttcgctcaactcacagagtttaacctttctgttcatagagcagttaggaaacactctgtttgtaaagtctgtaagtggatattctgacatccttgtggccttcgttggaaacgggatttcttcatattctgctagacagaagaattctcagtaacttccttgtgttgtgtgtattcaactcacagagttgaacgatgatttacacagagcagacttgaaactctctttttgtggaatttgcaactggagatttcagccgctttgaggtcaatggtagaataggaaatatcttcctatagaaactagacagaatgattctcagaaactcctttgtgatgtgtgcgttcaactcacagagttcaacctttcttttcatagagcagttgggaaacactctgtttgtaaagtctgcaagtggatattcaaacttctttgaggccttcgttggaagcgggatttcttcatattctgctagacggaagaattcccagtaacttccttgtgttgtgtgtgttcaactcacagagttgaactttcatttaaacagagcagatttgaaacactctttttgtggaatttgcaaatggagatttcaagcgctttgaggccaaaggcagaaaaggaaatatcttcgtttcaaaactagacagaatcattctcagaaactgctctgtgatgtgtgcgttcaactctcagagtttaacttttcttttcattcagcagtttggaaacactctgtttgtaaagtctgcacgtggataatttgaccacttagaggccttcgttggaaacggttttttttcatgtaaggctagacagaagaattcccagtaacttcctggtgttgtgtacattcaactcacagagttgaacgttcccttagacagagcagatttgaaacactctttttgtgcaattggcaaatggagatttcaagcgctttaaggtcaatggcagaaaaggaaatatcttcgtttcaaaactagacagaatcattcccacaaactgcgttgtgatgtgttcgttcaactcacagagtttaacctttctgttcatagagcagttaggaaaaactctgtttgtaaagtctgtaagtggatattctgacatcttgtggccttcgttggaaacgggatttcttcatattctgctagacagaagaattctcagtaacttccttgtgttgtgtgtattcaactcacagagttgaacgatcctttacacagagcagacttgaaacactctatttgtagaatttgcaagtggagatttcagccgctttgaggtcagtagtagaaaaggaaatatcttcgtggaaaaactagacagaatgattctcagaaactcctttgtgatgtgtgcgttgaactcacagagtttaacttttcttttcatagagcagttaggaaacactatgtttgtaaagtctgcaagtggatattcagacctctttgaggccttcgttggaaacgggatttcttcacattctgctagacagaagaattctcagtaacttccttgtgttgtgtgtattcaactcacagagttgaacgatcctttacacagagcagacttgaatcactctttttgtggaatttgcaaatggagatttcagccgctttgaggtcaatagtagaaaaggaaatatcttcgtagaaaaactagacagaatcattctcagaaactgctctgcgatgtgtgcgttcaactctcagagtttaacttttcttttcattcagcagtttggaaacactctgtttttaaagtctgcacgtggatattttgaccacttagaggccttcgttggaaacgggtttttttcctgtaaggctagacagaagaattcccagtaacttccttgtgttgtgtgcattcaactcacagcagttgaacgttcccttagacagagcagatttgaaacactctatttgtgcaatttgcaagtgtagatttcaagcgctttaaggtcaatggcagaaaaggaaatattttcgtttcaaaactagacagaatcattcccacaaactgcgttgtgatgtgttcgttcaactcacagagtttaacctttctgttcatagagcagttaggaaacactctgtttgtaaactctgtaagtggatattctgacatcttgtggccttcgttggaaacgggatttcttcacattctgctagacagaagaattctcagaaacttcccttgtgttgtgtgttttcaactcacagagttgaacgatcctttacacagagcagacttgaaacactccttttgtggaatttgcaagtggagatttcagccgctttgaggtcaatggtagaataggaaatatcttcctatagaaagtagacagaatgattctcagaaacttcattgtgatgtgtgcgttcaactcacagagtttaacctttcttttcatacagcagttaggaaacactctgtttgtaaactctgcaagtcgatattcacacctctttgaggccttcgttggaaacgggatttcttcatactgtgctagacagaagaattctcagtaacttccttgtgttgtgtgtattcaactcacagagttgaacgatcctttacacagagaggacttgaaacactctttttgtggaatttgcaagtggagatttcagccgcgttgaggtcaatggtagaaaaggaaatatcttcgtataaaaactagacagaatcattctcagaaagtgctctgcgatgtgtgcgttcaactctcagagtttaactttgcttttcattcagcagtttggaaacactctgtttgtaaagtctgcacgtggataatttgaccacttagaggccttcgttggaaacgggtttttttcatgtaaggctagacagaagaattcccagtaacttccttgtgttgtgtacattcaactcacagagttgaacgttcccttagacagagcagatttgaaacactctttttgtgcaattggaaagtggagatttcaagcgctttaaggtcaatggcagaaaaggaaatatcttcgtttcaaaactagacagaatcattcccacaaactgcgttgtgatgtgttcgttcaacacacagagtttaacctttcttttcatagagcagttaggaaacagtctgtttgtcaattctgtaagtggatattctgacatcttgtggccttcgttggaaacgagatttcttcatattctgctagacagaagaattctcagtaactaccttgtgttgtgtgtattcaactcacagagttgaacgatcctttacacagagcggacttgaaacactcgttttgtggaatttgcaagtggagatttcagccgcgttgaggtcaatggtagaaaaggaaatatcttcgtataaaaactagacagaatgattctcagaaactcctttgtgatgtgtgcgttcaactcacagagttcaacctttcttttcatagagcagttaggaaacactctgtttgtaaagtctgcaagtggatattcagacttctttgagtccttcgttggaagcgggatttcttcatgttctgctagacagaagaattctcagtaacttccttgtattgtgtgtattcaactcacagagttgaacgatcctttacacagagcagacttgaaacaatctttttgtggaatttgcaagtggagatttcagccgctttgaggtcaatggtagaataggaaatatcttcctatagaaactagacagagtgattctcagaaactcctttgtgatgtctgcgttcaactcacagagtttaaccttccttttcatagagcagttaggaaacactctgtttgtaaattctgcaagtggatattcagacctccttgaggccttcgttggaaacgggatttcttcatattctgctatacagaagaattctcagaaacttccttgtgttgtgtgttttcaactcacagagttcaacgatccattacacagagtatacttgaaacactctttttgtggaattggcaagtggagatttcagccgctttgaggtcaatggtagaaaaggaaatatcttcgtataaaaactagacagaatcattctcagaaactgctctgtgatgtgtgcgttcaactctcagagtttaacttttcttttcattcagcagtttggaaacactctgtttgtaaagtctgcacgtggatattttgaccacttagaggccttcgttggaaaagggatttcttcatatgatgctagacagaagaattcccagtaacttccttgtgttgtgtgcattcaactcacagagttcaacgttcccttagacagagcagatttgaaacactctatttgtgcaatttgcaagtgtagatttcaagcgctttaaggtcaatggcagaaaaggaaatatcttcgtttcaaaactagacagaatcattcccacaaactgcgttgtgatgtgttcgttcaactcacagagtttaacctttctgttcatagagcagttaggaaacactctgtaaagtctgtaagtggatattctgacatcttgtggccttcgttggaaacgggatttcttcatattctgctagacagaagaattctcagtaacttccttgtgttgtgtgtattcaactcacagagttgaacgatcctttacacagagcagacttgtaaccctctttttgtggaatttgcaagtggagatttcagccgctttgaagtcaaaggtagaaaaggaaatatcttcctataaaaactagacagaatgattctcagaaaatcttttgtgatgtgtgcgttcaactcaaagagtttaacttttcttctcatagagcagttaggaaacactctgtttgtaaagtctgcaagtggatattcagacctctttgaggccttcgttggaaaagggatttcttcatattatgctagacagaagaattctcagtaacttccttgtgttgtgtgtgttcaacacacagagttgaactttcatttacacagagcagatttgaaacactctttttgtggaatttgcaagtggagatttcaagcgctttgaggccaaaggcagaaaaggaaatatcttcgtttcaaaactagacagaatcattctcagaaactgctgcgtgatgtgtgcgttcaactctcagagtttaacttttcttttcattcagcggtttggaaacagtctgtttgtaaagtctgcacgtggatattttgaccacttagaggccttcgttggaaacgggttttttgcatgtaaggctagacagaagaattcccagtaacttccttgtgttgtgtacattcaactcacagagttgaacattcccttagacagagcagatttgaaacactctttttgtgcaattggcaaatggagatttcaagcgctttaaggtcaatggcaggaaaggaaatatcttcgtttcaaaactagacagaatgattctcagaaactcctttgtgatgtgtgcgttcaactcacagagtttaacctttcttttcatagagcagttaggaaacactctgtttgtaaagtctgcaagtggatattcacacctctttgaggccttcgttggaaacgggatttcttcatattatgctagacagaagaattctcagtaacttccttgtgttgtctgtattcaactcacagagttgaacgatcctttacacagagcagacttgaaacactctttttgtggaatttgcaagtggagatttcagccgctttgaggtcaatggtagaataggaaatatcttcctatagaaactagacagaatgattctcagaaactcctttgtgatgtgtgcgttcaagtcacagagtttaacctttcttttcatagagcagttaggaaacactctgtttgtaaagtctgcaagtggatattcagacctccttgaggctttcgttggaaacgggatttcttcatattctgctagacagaagaattctcagtaacttccttttgttgtgtgtattcaactgacagagttgaactttcatttacacagagcagatttgaaacactctttttgtggtatttgcaagtggagatttcagccgctttgatgtcaatgatagaaaaggaaatatcttcatataaaaattagacagaatgattctcagaaacttctttgtgatgtgtgcgttcaactcacagagttttacctttcttttcatagagcagttaggaaacactctgtttgtaaagtctgcaagtggatattcagacctctttgaggccttcgttggaaacgggatttcttcatactatgctagacagaagatttcccagtaacttccttgtgttgtgtgtgttcaactcacagagttgaactttcatttacacagagcagatttgaaacactctttttgtggaatttgcaaatggagatttcaagcgctttgaggccaaaggcagaaaaggaaatgccttcgtttcaaaactagacagaatcattctcagaaactgctctgcgatgtgtgcgttcaactctcagagtttaacttttctttccattcagcagtttggaaacactctggttgtaaagtctgcacgtggataacttgaccacttagaggccttcgttggaaacgggtttttttcctgtaaggctagacagaagaattcccagtaacttccttgtgttgtgtgcattcaactcacagagatgaacgttcccttagacagagcagatttgaaacattctatttgtgcaatttgcaagtgtagatttcaagcgctttaaggtcaatggcagaaaaggaaaaatcttcgtttcaaaactagacagaatgattctcagaaaatcttttgtgatgtgtgcgttcaactcacagagtttaacttttcttctcatagagcagttaggaatcactctgtttgtaaactctgcaagtggatattcagacctctttgaggccttcgttggaaacgggatttcttcacattctgctagacagaagaattctcagtaacttccttgtgttgtgtgtattcaactcacagagttgaacaatcctttacacagagcagacttgaaacactctttttgtggaatttgcaagtggagatttcaggcgctttgaggtcaatggtagaaaaggaaacatctccgtataaagactagacagaatgattctcagaaactcctttgtgttgtgtgcgttcaactcacagagtttaacctttcttttcatagagcagttaggaaacactctgtttgtaaagtctgcaagtggatattcagacatctttgaggctttcgttggaaacgggatttcttcatattctgctagacagaagaattctcagtaacttccttgtgttgtgtgtattcaactcacagagttgaacgatcctttacatagagcagtcttgaaacgctctttttgtggaatttgcaagtggagatttcagccgctttgaggtcaatagtagaaaaggaaatatcttcgtagaaaaactagacagaatgattctcagaaactcctttgtgatgtgtgcgttcaacacacagagtttaacctttcttttcatagagcagttcggaaacactctgtttgtaaagtctgcaagtggatattcagacttctttgaggccttcgttggaaacgggatttcttcttattctgctagacagaagaattctcagtaacttccttgtgttgtgtgtattcaactcacagagttgaatgatcctttacacagagcagacttgaaactctctttttctggaatttgcaagtggagatttcagccgctttgaggtcaatggtagaaaagtaaatatcttcgtataaagactagacagaatgattctcagaaactcctttgtgatgtgtgcgttcaactcacagagtttaacttttcttttcatagagcagttaggaaacactctgtttgtaaagtctgcaagtggatattcagacctctttgaagccttcgttggaaacgggatttcttcatattatgctagacagaagaattctcagtaacttccttgtgttgtgtgtattcaactgacagagttgaactttcattttgagagagcagatttgaaacactgtttttgtggaatttgcaagtggagatttcaagcgcttttgggccaaaggcagaaaaggaaatatcttcgtataaaaactagacagaatcattctcagaaactgctgcgtgatgtgtgcgttcaactctcagagtttaacttttcttttcattcagcggtttggaaacactctgtttgtaaagtctgcaagtggatattttgaccacttagaggccttcgttggaaacgggattttttcatgtaaggctagacagaagaattcccagtaacttccttgtgttgtgtgcattcaactcacagagttgaacgttcccttagacagagcagatttgaaacactctatttgtgcaatttgcaagtgtagatttcaagcgcattaaggtcaatggcagaaaaggaaatatcttcgtttcaaaattagacagaatcattcccacaaactgcgttgtgatgtgttcgttcaactcacagagtttaacctttccgttcatagagcagttaggaaacactctgtttgtaaagtctgtaagaggatattctgacatcttgtggccttcgttggaaacgggatttcttcatattctgctagacagaagaattctcagtaacttccttctgttgtgtgtattcaactcacagagttcaacgatcctttacacagagcagacttgaaacactctttttgtggaatttgcaagtggagatttcagccgctttgaggtcaatggtagaaaaggaaatatcttcgtataaaaactagacagaatgattctcagaaacttctttgtgatgtgtgtgttcaactcacagagtttaacctttcttttcatagagcagttaggaaacactgtgtttttaaactctgcaagtggatattcagacctatttgaggccttcgttggaaacgggatttcttcatactgtgctagacagaagaattctcagtaacttccttgtgttgtgtgtattcaactcacagagttgaacgatcctttacacagagcagacttgaaacactctttttgtggaatttgcaagtggagatttcaagcgctttgaggccaaaggcagaaaaggaaatatcttcgtttaaaaactagacagaatcattctcagaaactgctctgcgatgtgtgcgttcaactctcagagtttaacttttcttttcattcagcagtttggaaacactctgtttgtaaagtctgcacgtggatattttgaccacttagaggccttcgttggaaacgggtgtttttcctgtaaggctagacagaagaattcccagtaacttccttgttttgtgtacattcaactcacagagttgaacgttcccttagatagagcagatttgaaacactctttttgtgcaattggcaagtggtgatttcaaccgctttgaggtcaatggtagaaaaggaaatatcttcgtataaaaactagacagaatgattcccacaaactgcgttgtgatgtgttcgtacaactcacagagtttaacctttctgttcatagagcagttaggaaacactctgtttgtaaagtctgtaagtggatattcagaactctttgaggtcttcgttggaaacgggatttcttcatattctgctagacagaagaattctcagtaacttccttgtgttgtgtgtattctactcacagagttgaacgatcctttacacagagcagtcttgaaacactctttttgtggaatttgcaagtggagatttcagccgctttgaggtcaatagtagaaaaggaaatatcttcgtagaaaaactagacagaatgattctcagaaactcctttgtgacgtgtgcgttcaactcacagagtttaacctttcttttcatagagcagttaggaaacactctgtttgtaaagtctgcaagtggatattcagacctccttgaggccttcgttggaaacgggatttcttcatattctgctagacagaagaattcccagtaacttctttgtgttgtgtgtgttcaactcacagagttgaactttcatttacacagagcagatttgaaacactctttttgtggaatttgcaagtggagatttcaagcgctttgaggccaaaggcagaaaaggaaatatcttcgtataaaaactagacagaatcattctcagaaactgctctgcgatgtgtgcgttcaactctcagagtttaacttttcttttcattcagcagtttggaaacactctgtttgtaaagtctgcacgtggatattttgaacacttagaggccttcgttggaaacgggtttttttcctgtaaggctagacagaagaattcccagtaacttccttgtgttgtgtgcattcaactcacagagttgaacgttcccttagacagagcagatttgaaacactctatttgttcaatttgcaagtgtagatttcaagcgctttaaggtcaatggcagaaaaggaaatatcttcgtttcaaaactagacagaatcattcccacaaacagcgttgtgatgtgttcgttcaactcacagagtttaacctttctgttcagagagcagttaggaaacactctgtttgtaaagtctgaaagtggatattcagacatcttgtggccttcgttggaaacgggatttcttcatattctgctagacagaagaattctcactaacttccttgtgttgtgtgtattcaactcacagagttgaacgatcctttacacagagcagacttgaaacactctttttgtggaatttgcaagtggagatttcagccgctttgaggtcaatagtagaaaaggaaatatcttcgtagaaaaactagacagaatgattctcagaaactcctttgtgatgtgtgtgttcaactcacagagtttaacctttcttttcatagagcagttaggaaacactctgtttgtaaagtctgcaagtggatattcagacctcgtttgaggccttcgttggaaactggatttcttcatattctgctagacagaagaattctcagtaacttccttgtgttgtgtgtattcaactgacagagttgaactttcatttagagagagctgatttgaaacactgtttttgtggaatttgcaagtggagatttcaagcgctttggggccaaaggcagaaaaggaaataccttcgtataaaaactagacagaatcattctcagaaactgctctgcgatgtgtgtgttcaactctcagagtttaacttttcttttcattcagcagtttggaaacactctgtttgtaaagtctgcacgtggatattttgaccacttagaggccttcgttggaaacgggtttttttcatgtaaggctatacagaagaattcccagtaacttccttgtgttgtgtacattcaactcacagagttgaacgttcccttagacagagcagatttgaaatactctttttgtgcaattggcaagtggagatttcaagcgctttaaggtcaatggcagaaaaggaaatatcttcgtttcaaaactagacagaatcattcccacaaactgcgttgtgatgtgttcgttcaactcacagagtttaacctttctgttcatggagcagttaggaaacactctgtttgtaaagtctgtaagtggatattctgacatcttgtggccttcgttggaaacgggatttcttcatattctgctagacggaagaattctcagtaacttccttgtgttgtgtgtattcaactcacagagttgaacgatcctttacacagagcagacttgaaacaccctttttgtggaatttgcaagtggagatttcagccgctttgaggtcaatagtagaaaaggaaatatcttcgtagaaaaactagacagaatgattctcagaaactccttagtgatgtgtgcgttcaactcacagagtttaacttttcttttcatagagcagttaggaaacactctgtttgtaaagtctgcaagtggatattcagacctctttgaggccttcgttggaaacgggatttcttcatattctgctagacagaagaattctcagtaacttccttgtgttgtgtgtattcaactcacagagttgaacgatcctttacacagagcaatcttgaaacattctttttgtggaatttgcaagtggagatttcagccgctttgaggtcaatggtagaataggaaatatcttcctatagaaactagacagaatcattctcagaaactgctctgcgatgtgtgcgttcaactctcagagtttaacttttcttttcattcagcagtttggaaacactctgtttgtaaagtctgcacgtggatattttgaccacttagaggccttcgttggaaacgggttttcttcctgtaaggctagacagaagaattcccagtaacttccttgtgttgtgtacattcaactcacagagttgaacgttcccttagacagagcagatttgaaacactctttttgtgcaattggcaagtggtgatttcagctgctttggggtcaatggtagaaaagggaatatcttcgtataaaaactagacagaatgattctcagaaactcctttgtgatgtgtgcgttcaactcacagagtttaacctttcttttcatagagcagttaggaaacactctgtttgtaaagtctgcaagtggatattcagacctctttgaggccttcgttggaaacgggatttcttcatattctactagacagaagaattctcagtaacttccttgtgttgtgtgtattcaactcacagagttgaacgatcctttacacagagcaaacttgaaacactcttcttgtggaatttgcaagtggagatttcagccgctttgaggtcaattgtagaataggaaatatcttcctatagaaactagacagaatgattctcagaaactcccttgtgatgtgtgcgttcaactcacagagttttagctttcttttcatagagcagttaggaaacactctgtttgtaatgtctgcaagtggatattcagacctctttgaggccttcattggaaacgggatttcttcatattatgctagacacaagaattctcagtaacttgccttgtgttgtgtgtattcaactcacagagttgaacgatcctttacacagagcagacttgaaacactctttttgtggaatttgcaagtggagatttcagccgctttgaggtcaatggtagaataggaaatatcttcctattgaaactagacagaatgattctcagaaacgcctttgtgatgtgtgtgttcaactcacagagtttaacctttcttttcatagagcagttaggaaacactctgttggtaaagtctgcaagtggatattcagacctctttgaggccttcgttggaaacgggatttcttcatactgtgctagacagaagaattctcagtaacttccttgtgttgtgtgtattcaactcacagagttgaacgatcctttacacagagcggaattgaaacactctttttgtgtaatttgcaagtggagatttcagccgcgttgaggtcaatggtagaaaaggaaatctcttcgtataaaaactagacagaatcactctcagaaactgctctgcgatgtgtgcgttcaactctcagagtttaacttttcttttcattcagcagtttggaaacactctgtttgtaaagtctgcacgtggatattttgacctctcagaggtcttcgttggaaacgggtttttttcctgtaaggctagacagaagaattcccagtaacttccttgtgttgtgtacattcaactcacagagttgaacgttcccttagacagagcagatttgaaacactctttttgtgcaattggcaaatggagatttcaagcgctttaaggtcaatggcaggaaaggaaatatcttcgtttcaaaactagacagaatgattctcataaactcctttgtgatgtgtgcattcaactcacggagtttcacctttcttttcatagagcagttaggaaacactctgtttgtaaagtctgtaagtggatattctgacatcttgtggccttcgttggaaacgggatttcttcatattctgctagacagaagaattctcagtaacttccttgtgttgtgtgtattcaactcacagagttgaacgatcctttacacagagcatacttgaaacactcttcttgtggaatttgcaaatggagatttcagccgctttgaggtccatggtagaataggaaatatcttcctatagaaactagacagaatgattctcagaaactcctttgtgatgtctgcgttcaactcacagagtttaacctttcttttcatagagcagttaggaaacactctgtttgtaaagtctggaagtggatattcagacctccttgaggccttcgttggaaacgggatttcttcatattatgctagatagaagaattctcagtaacttccttgtgttgtgtgtattcaactgacagagttgaactttcatttagagagagcagatttgaaacactgtttttgtggaatttgcaagtggagatttcaagcgctttggggccaaaggcagaaaaagaaatatcttcgtataaaaactagacagaatcattctcagaaactgctctgtgatgtgtgcgttcaactctcagagtttaacttttcttttcattcagcagtttggaaacaatctgtttgtaaagtctgcacgtggatattttgaccacttagaggccttcgttgaaaacgggtttctttcatgtaaggggagacagaagaattcccagtaacttccttgtgttgtgtgcattcaactcacagagttgaacgttcccttagacagagcagatttgaaacactctatttgtgcattttgcaagtgtagatttcaagcgctttaaggtcaatggcagaaaaggaaatatcttcgtttcaaaactagacagaatcattcccacaaactgcgttgtgatgtgttcgttcaactcacagagtttaacctttcttttcatagagcagttaggaaaaattctgtttgtaaattctgtaagtggatattctgtaatcttgtggccttcgttggaaacgggctttcttcatattctgctagacagaagaattctcagtaacttccttgtgttgtgtgtattcaactcacagagttgaacgatcctttacacagagcagacttgaaacactctttttgtggaatttgcaagtggagatttcagccgcgttgaggtcaatggtataaaaggaaatatcttcgtataaaaactagacagaatgattctcagaaactcctttgtgatgtgtgcgttcaactcacagagtttaacctttcttttcatagagcagttaggcaacactctgtttgtaaactctgcaagtggatattcagacctctttgaggccttcgatggaaacgggatttcttcatactatgctggagagaagaattctcagtaacttccttgtgttgtgtgtattcaactcacagagttgaacgatcctttacacagagcagacttgaaacactctttttgtggaatttgcaagtggagatttcagccgctttgaggtcaatggaagaaaaggaaatatcttcgtataaaaactagacagaatcattctcagaaactgctctgcgatgtgtgcgttcaactctcagagtttaacttttcttttcattcagcagtgtggaaacactctgtttgtaaagtctgcacgtggatattttgaccacttagaggccttcgttggaaaagggtttttttcctgtaaggctagacagaagaattcccagtaacttcccttgtgttgtgtacattcaactcacagagttgaacgttcccttagacagagcagatttgaaacactctttttgtgcaattggcaagtggagattacaagcgctttaaggtcaatggcagaaaaggaaatatcttcgtttcaaaactagacagaatcattcccacaaactgcgttgtgatgtgttcgttcaactcacagagtttaacctttctattcatagagcagttaggaaacactctgtttgtaaagtctgtaagtggatattctgacatcttgtggcatttgttggaaacgggatttcttcatattctgctagacagaataattctcagtaacttccttgtgttgcgtgtattcaactcacagagttgaacgatcctttacagagagcagacttgaaacactctttttgtggaatttgcaagtggagatttcagccgctttgaggtcaatgatagaataggaaatatcttcctatagaaactagacagaatgattctcagaaactcctttgtgttgtgagcgttcaactcacagagtttaacctttcttttcatagagcagttaggaaacactctgtttataaagtctgcaagtggatattcagacccctttgaggccttcgttggaaacgggatttcttcatattatgctagacagaagaattctcagtaacttccttgtgttgtgtgtattcaactgacagagttgaactttcatgtagagagagcagatttgaaacactgtttttgtggaatttgcaagtggagatttcaagcgctttggggccaaaggcagaaaaggaaatatcttcgtataaaactagacagaatcattctcagaaactgctctgtgatgtgtgcgttcaactctcagagtttaacttttcttttcattcagcagtttggaaacactctgtttgtaaagtctgcacgtggataatttgaccacttagaggccttcgttggaaacgggtttttttcatgtaaggctagacagaagaattcccagtaacttccttgtgttgtgtgcattcaactcacagagttgaacgttcccttagacagagcagatttgaaacactctatttgtgcaatttccaagtgtagttttcaagctctttgaggtcaacggcagaaaaggaaatatcttcgtttcaaaactagacagaatcattcccacaaactgcgttgtgatgtgttcgttcaactcacagagattaacctttcttttcatagagcagttaggaaacactctgtttgtaaattctgtaagtggatattctgacatcttgtggcctttgttggaaacgggatttcttcatattctgctagacacaagaattctcagtaacttccttgtgttgtgtgtattcaactcacagagttgaacgatcctttacagagggcagacttgaaacactctttttgtggaatttgcaagtggagatttcagccgttttgaggtcaatggtagaaaaggaaatatcttcgtataaagactagacagaatgattctcagaaactcctttgtgatgtgtgcgttcaactcacagagtttaacttttcttttcatagagcagttaggaaacactctgtttgtaaagtctgcaagtggatattcagacctctttgaggccttcgatagaaacgggatttcttcatattctgctagacagaggaattctcagtaacttctttgtgttgtgtgtattcaactcacagagttgaacgatcctttacacagagcagacttgaaacactctttttgtggaatttgcaattggagatttcagccgctttgagttcaagggtagaataggaaatatcttcctatagaaactagacagaatgattctcagaaactcctttgtgatgtgtgcgttcaactcacagagttcaacctttcttttcatagagcagttgggaaacactctgtttgtaaagtctgcaagtggatattcagacttctttgagaccttcgttggaagcgggatttcttcatattctgctagacagaataattctcagtaacttccttgtgttgtgtgtattcaactcacagagttgaacgatcctttacacagagcagacttgaaacattctttctgtggaatttgcaagtggagatttcagccgctttgaggtcaatggtagaataggaaatattttcctatagaaactagacagaatgattctcagaaactcctttgtgatgtgtgcgttcaactcacagagtttaacttttcttttcatagagcagttaggaaacactctgtttgtaaagtctgcaagtggatattcagacctctttgaggccttcgttggaaacgggatttcctcatattatgctagacagaagaattctcagtaacttccttgtgttgtgtgtattcaactgacagagttgaactttcatttagagagagcagatttgaaacactgtttttgtggaatttgcaagtggagatttcatgcgctttggggccaaaggcagaaaaggaaatatcttcgtataaaaactagacagaatcattctcagaaagtgctctgcgatgtgtgcgttcaactctcagagtttaactttgcttttcattcagcagtttggaaacactctgtttgtaaagtctgcacgtggataatttgaccacttagaggccttcgttggaaacgggtttttttcatgtaaggctagacagaagaattcccagtaacttccttgtgttgtgtacattcaactcacagagttgaacgttcccttagacagagcagatttgaaacactctttttgtgcaattggcaaatggagatttcaagcgctttaaggtcaatggcagaaaaggaaatatattcgtttcaaaactagacagaatcattcccacaaactgcgttgtgatgtgttcgttcaactcacagagtttaacgtttccgttcatagagcagttaggaaacacactgtttgtaaagtctgtaagtggatattctgacatcttgtggccttcgttggaaacgggatttcttcatattctgctagacagaagaattctcagtaacttccttgtgttgtgtgtattcaactcacagagttgaacgatcctttacacagagcagacttgaaacactctttctgtggaatttgcaagtggagatttcagccgctttgaggtcaatagtagaaaaggaaatgtcttcgtagaaaaactagacagagtgattctcagaaactcctttgtgatgtctgcgtttaactcacagagtttaacctttcttttcatagagcagttaggaaacactctgtttgtaaagtctgcaagtggatattcagacctccttgaggccttcgttggaaacgggatttctccatattatgctggacagaagaattctcagtaactttcttgtgttgtgtgtattcaactgacagagttgaactttcatttagagagaccagatttgaaacactgtttttgtggaatttgcaagtggagatttcaagcgctttggggccaaaggcagaaaaggaaatatcttcgtataaaaactagacagaatcattctcagaaactgctgcgtgatgtgtgcgttcacctctcagagtttaacttttcttttcattcagcggtttggaaacactctgtttgtaaagtctgcacgtggaaattttgaccacttagaggccttcgttggaaacgggtttttttcatgtaaggctagacagaagcaattcccaggaacttccttgtgttgtgtacattcaactcacagcagttgaacgttcccttagacagagcagatttgaaacactctttttgtgcaattggcaagtggtgatttcagccgctttgaggtcaatggtagaaaaggaaatatcttcgtataaaaactagacagaatcattcccacaaactgcgttgtgatgtgttcgttcaactcacagagtttaacctttctgttcatagagcagttaggaaacactctgtttgtaaagtctgccagtggatattcagacctccttgaggccttcgttggaaacgggatttcttcatattctgctagacagaagaattctcagaatcttccttgtgttgtgtgtattcaactcacacagttgaacgatggtttacacagagcagatttgaaacactctttttgtggaatttgcaagtggagatttcagccgctttgaggtcaatggtagaaaaggaaatatcttcgtataacaactagacagaatgattctcataaactcctttgggatgtgtgcgttcaactcacagagtttaacctttcttttcatagagcagttaggaaacactctgtttgtaaagtctgcaagtggatattcagacctctttgaggccttcgttggaaacgggatttcttcatattctgctagacagaagaattcccagtaacttccatgtgttgtgtgtgttcaactcacagagttgaactttcatttacacagagcagatttgaaacactctttttgtggaatttgcaaatggagatttcaagcgctttgaggccagaggcagaaaaggaaatatcttcgtataaaaactagacagaatcactctcagaaactgctctgtgatgtgtgcgttcaactctcagagtttaacttttcttttcattcagcagtttggaaacactctgtttgtaaagtctgcacgtggatattttgaccacttagaggccttctttggaaacgggtttttttcatgtaaggatagacagaagaattcccagtaacttccttgtgttgtgtgcattcaactcacagagatgaacgttcccttagacagagcagatttgaaacactctatttgtgcaatttgcaagtgtagatttcaagggctttaaggtcgatggcagaaaaggaaatatcttcgtttcaaaactagacagaatgattctcagaaactcctttgtgatgtgtgcgttcaactcacagagtttaacctttcttttcatagagcagttaggaaacactctgtttgtaaagtctgcaagtggatattcagacatctttgaggccttctttggaaacgggatttcttcatgttctgctagacagaagaattctcagaaacttccttgtgttgtgtgttttcaactcacagagttgaacgatgctttacacagagtagacttgaaacactctttttgtgtaatttgcaagtggagatttcagccgctttgagagtcaatggtagaaaaggaaatatcttcgtataaaaactaggcagaatgattctaagaaacttctttgtgatgtgtgcgttcaactcacagagtttaacctttcttttcatagagcagttaggaaacactctgtttgtaaactctgcaagtggatattcagacctctttgaggccttcgttggaaacgggatttctccatactgtgcgagacagaagaattctcggtaacttccttgtgttgtgtgtattcaactgacagagttgaaatttcatttagagagagcagatttgaaacactgtttttgtggaatatgcaagtggagatttcaagcgctttggggccaagggcagaaaaggaaatatcttcgtataaaaactagacagaatcattctcagaaactgctgcgtgatgtgtgcgttcaactctcagagtttaacttttcttttcattcagcggtttggaaacactctgtttgtaaagtctgcacgtggatattttgaccacttagaggccttcgttggaaacgggttttttttcatgtaaggctagacagaagaattcccagtaacttccttgtgttgtgtacattcaactcacagagttgaacgttcccttagacagagcagatttgaaacactctttttgtgcaattggcaagtggagatttcaagcgctttgaggtcaatggcagaaaaggaaatatcttcgtttcaaaactagacagaatcattcccacaaactgcattgtgatgtgttcgttcaactcacagagtttaacctttcttttcatagagcagttaggaaacagtctgtttgtaaattctgtaagtggatattctgacatcttgtggccttcgttggaaacgggatttcttcatattctgctagacagaagaattctcagtaacttccttgtgttgtgtgtattcaactcacggagttgaacgatcctttacacagagcagacttgaaacactctttttgtggaatttgcaagtggagatttcagccgctttgaggtctatagtagaaaaggaaatatcttcatagaaaaactagacagaatgattctcagaaactcctttgtgatctgtgcgttcaactcacagagtttaacctttcttttcatagagcagttaggaaacactctgcttgtaaagtctgcaagtggatattcagccctctttgaggccttcgttggaaacgggtttttttcatataaggctagacagaagaattctcagtaacttccttgtgttgtgtgtattcaactcacagagttgaacgatcctttacacatagcagacttgaaacactctttttgtggaatttgcaagtggagatttcagccgctatggggtcaatggtagaataggaaatatcttcctatagaaactagacagaatgattctcagaaactcctttgtgatgtgtgcgttcaactcacagaatttaacatttcctttcatagagcagttaggaaacactctgtttgtaaagtctgcaagtggatattcagacctctttgaggccttcgttggaaacgggatttcttcatattctgctagacagaagaattcccagtaacttccttgtgttgtgtgtgttcaactcacagagttgaactttcatttacacagagcagatttgaaacactctttttgtggaatttgcaagtggagatttcatgcgctttgaggccaaaggcagaaaaggaaatatcttcgtataaaaactagacagaatcattctcagaaactgctctgcgatgtgtgcgttcaactctcacagtttaacttttcttttcattcagcagtttggaaacactctgtttgtaaagtctgcacgtggataatttgaccacttagaggccttcgttggaaacgggtttttttcatgtaaggctagacagaagaattcccagtaacttccttgtgttgtgtgcattcaactcacagagttcaacgttcccttagacagagcagatttgaaacactctatttgtgcaatttgcaagtgtagatttcaagcgctttaaggtcaacggcagaaaaggaaatatcttcgtttcaaaactagacagaatcattcccacaaactgcgttgtgatgtgttagttcaactcacagagtttaacctttcttttcatagagcagttaggaaacagtctgtttgtcaattctgtaagtggatattctgacatcttgtggccttcgttggaaacgggatttcttcatattctgctagacagaagaattctcagtaacttccttgtgttgtgtgtattcaactcacagagttgaacgatcctttacacagagcagacttgaaacactctttttgtggatttgcaagtggagatttcagccgctttgaggtcaatggtagaatagtaaatatcttcctgtagaaacaagagagaatgattctcagaaactcctttgtgatgtgtgcgttcaactcacagagtttaacctttcttttcatagagcagttaggaaacactctgtttgtaaagtctgcaagtggatattcagacctctttgaggccttcgttggaaacgggaattcttcatattatgctagacagaagaattcccagtaacttccttgtgttgtgtgtgttcaactcacagagttgaactttcatgtacacagagcagatttgaaacactctttttgtggaatttgcaagtggagatttcaagcgctttgaggccaaaggcagaaaaggaaatatcttcgtataaaaactagacagaatcattctcagaaactgctctgcgatgtgtgcgttcaactctaagagtttaacttttcttttcattcagcagtttggaaacactctgtttgtaaagtctgtacgtggataatttgaccacttagaggccttcgttggaaaagggtttttttcatgtaaggatagacagaagaattcccagtaacttccttgtgttgtgtacattcaactcacagagttgaacgttcccttagacagagcagatttgaaacactctttttgtgtaattggcaagtggagatttcaagcgctttaaggtcaatggcagaaaaggaaatatcttcgtttcaaaactagacagaatcattcccacaaactgcgttgtgatgtgttcgttcaactcacagagtttaacctttcttttcatagagcagttaggagacactctgtttgtaatgtctgcaagtggatattcagacctctttgaggccttcgttggaaacgggatttcttcatattatgctacacagaagaattctcagtaacttccttgtgttttgtgaattcaactcacagagttgaacgatcctatacacagagcagacttgaaacactctttttgtggaatttgcaagtggagatttcagccgctttgtggtcaatagtagaataggaaatatcttcctatagaaactagacagaatgattctcagaaactcctttgtgatgtgtgcgttcaactcacagagtttaacctttctgttcatagagcagttaggaaacactctatttgtaaagtctgcaagtggatattcagacctctttgaggccttcgttggaaacgggatttcttcatattctgctagacagaagaattctcagtaacttccttgtgttgtgtgtattcaactgacaagagttgaactttcatttggagagagcagatttgaaacactgtttttgtggaatttgcaagtggagatttcaagcgctttggggccaaaggcagaaaaggaaatatcttcgtataaaaactagacagaatcattctcagaaactgctctgcgatgtgtgcgttcaactctcagagtttaactttgcttttcattcagcagtttggaaacactctgtttgtaaagtctgcacgtggataatttgaccacttagaggccttcgttggaaacgggtttttttcatgtaaggctggacagaagaattcccagtaacttccttgtgttgtgtacattcaactcacagagttgaacgttccgttagacagagcagacttgtaacactctttttgtggaatttgcaagtggagttttcagccgcttttaagtcaatggtagaaaaggtaatatcttcctataaaaactagacagaatgattctcagaaactcctttgtgatgtgtgcgttcaactcacagagtttaacctttcttttcatagagcagttaggaaacactctgtttgttaagtctgcaagtggatattcagtcctctttgaggccttcgttggaaacgggatttcttcatattatgctagacagaagaattctcagtaacttcattgtgttgtgtgtattcaactcacagatttcaacgatcctttacacagagcagacttgaaacactctttttgtggaatttgcaagtggagatttcagccgctttgaggtcaatggtagaataggaaatatcttcctatagaaactagacagaatgattctcataaactcctttgtgatgtgtgcgttcaactcacagagtttaacctttcctttcatagagcagttaggaaacactctgtttgtaaagtctgcaagtggatattcagacctccttgaggccttcgttggaaacgggatttcttcatattctgctagacagaagaattcccagtaacttccttgtgttgtgtgtgttctactcacagagttgaactttgatttacacagagcagatttgaaacactctttttgtggaatttggaagtggagatttcaagcgctttgaggccaaaggcagaaaaggaaatatcttcgtataaaaactagacagaatcattctcagaaactgctctgcgatgtgtgcgttgaactctcagagtttaacttttcttttcattcagcagtttggaaacactctgtttgtaaagtctgtacgtggatattttgaccacttagaggccttcgttggaaacgggtttttttcctgtaaggctagacagaagaattcccagtaacttccttgtgttgtgtgcattcaactcacagagttgaacgttcccttagacagagcagatttgaaacactctatttgtgcaatttgcaagtgtagttttcaagctctttaaggtcaacggcagaaaagcaaatatcttcgtttcaaaactagacagaatgattctcagaaactcctttgtgatttgtgcgttcaactcacagagtttaacttttcttttcatagatcagttaggaaacactctgtttgtaaagtctgcaagtggatattcagacctctttgatgccttcgttggaaacgggatttcttcatattatgctagacagaataattctcagtaacttccttgtgttgtgtgtattcaactcacagagttgaacgatcctttagagagagcagacttgaaacactctttttgtggtatttgcaagtggagatttcagccgctttgtggtcaatggtagaaaaggaaactatcatcgtataaagactagacagaatgattctcagaaactcctttgtgatgtgtgtgttcaactcacagagtttaacctttcttttcatagagcagttaggaaacactctgtttgtaaagtctgcaagtggatattcagacctctttgaggccttcgttggaaacgggtttttttcatataaggctagacaaaagaattcccagtaacttccttgtgttgtgtgtgttcaactcacagagttgaactttcatttacacagagcagatttgaaacactctttttgtggaatttgcaaatggagatttcaagcgctttgaggccaaaggcagaaaaggaaatatcctcgtataaaaactagacagaatcattctcagaaactgctctgcgacgtgtgcgttcaactctcagagtttaacttttcttttcattcagcagtttggaaacactctgtttgtaaagtctgcacgtggataatttgaccacttagaggccttcgttggaaacgggtttttttcatgtaaggctagacagaagaattcctagtaacttccttgtgttgtgtacattcaactcacagagttgaacgttcccttagacagagcagatttgaaacactatttttgtgcaattggcaagtggtgatttcagccgctttgaggtcaatggtataaaaggaaatatcttcgtattaaaactagacagaatcattcccacaaactgcgttgtgatgtgttcgttcatctcacagagtttaacctttcttttcatagagcagttaggaaacagtctgtttgtaaattccgtaagtggatattctgacatcttgtggccttcgttggaaacgggatttcttcatattctgctagacagaagaattctcagaaacttccttttgttgtgtgtattcaactcacagagttgaacgatcctttacacagagcagattagaaaaactctttttgtggaatttgcaagtggagatttcagccgctttgaggtcaatggtagaaaagggaatatcttcgtataaaaactagacagaatgattctcagaaactcctttgagatgtgtgcgttcaactcacagagtttaacctttcttttcatagagcagttaggaaacactctgtttgtaaagtctgcaagtggatattcagacctctttgaggccttcgttggaaacgggttttttcatataaggctagacagaagaattctcagtaacttccttgtgttgtgtgtattcaactcacagagttgaactatcctttacacagagcagacttgaaacactctttttgtggaatttgcaagtggagatttcaagcgctttgaggccaaaagcagaaaaggaaatatcttcgtataaaaactagacagaatcattctcagaaactgctgcgtgatgtgtgcgttcaactctcagagtttaacttttcttttcattcagcggtttggaaacactctgtttgtaaagtctgcacgtggatattttgaccacttagaggccttcgttgggaaacgggtttttttcatgtaaggctagacagaagaattcccagtaacttccttgtgttgtgtgtgttcaactcacagagttgaactttcatttacacagagcagatttgaaacactctttttgtggaatttgcaaatggagatttcaagcgctttgaggccaaaggcagaaaaggaaatatcttcgtttcaaaactagacagaatcattcccacaaactgcgttgtgatgtgttcgttcaactcacagagtttaacctttctgttcatagagcagttaggaaacactctgtttctaaagtctgtaagtggatattctgacatcttgtggccttcgttggaaacgggatttcttcatattctgctagacagaagaattctcaataacttccttgtgttgtgtgtattcaactcacagagttgaacgatcctttacacagagcagacttgaaacactcttgttgtggaatttgcaagtggagatttcagccgctttgaggtcaatggtagaataggaaatatcttcctataaaaactagacagaatgattctcagaaactcctttgtgatgtgtgcgttcaactcacagagtttaacctttcttttcatagagcagttaggaaacactctgcttctaaagtatgcaagtggatatttagccctctttgaggccttcgttggaaacgggtttttttcatataaggctagacagaagaattcccagtaacttccttgtgttgtgtgtgttcaactcacagagttgaactttcatttacacagagcagatttgaaacactctttttgtggaatttgcaagtggagatatcaagcgctttgaggccaaaggcagaaaaggaaatatcttcgtataaaaactagacagaatcattctcagaaactgctctgcgatgtgtgcgttgaactctcagagtttaacttttcttttcattcagcagtttggaaacactctgtttgtaaagtctgcacgtggataatttgaccacttagaggccttcgttggaaacgggtttttttcatgtaaggctagacagaagaattcccagtaacttccttgtgttgtgtgcattcaactcacagagttgaacgttcccttagacagagcagatttgaaacactctatttgtgcaatttgcaagtgtagatttcaagcgctttaaggtcaacggcagaaaaaggaaatatcttcgtttcaaaactagacagaatcattcccacaaactgcgttgtgatgtgttcgttcaactcacagagtttaacctttcttttcatagagcagttaggaaacactctgttggtaaattctgtaagtggatattctgacatcttgtggcctccgttggaaacgggatttcttcatattctgctagacagaagaattctcagtaacttccttgtgttgtgtgtattcaactcacacagttgaacgatcctttacacagagcggacttgaaacactcgttttgtggaatttgcaagtggagatttcagccgcgttgaggtcaatggtagaaaaggaaatatcttcgtataaaaactagacagaatgattctcagaaactcctttgtgatgtgtgtgttcaactcacagagtttaacctttcttttcatagagcagttagtaaacactctgtttataaagtctgcaagtggatattcagacccctttgaggccttcgttggaaacgggatttcttcatattctcctagacagaagaattctcagtaacttccttgtgttgtgtgtattcaactgacagagttgaactttcatttggagagagcagatttgaaacactgtttttgtggaatttgcaagtggagatttcaagcgctttggggccaaaggcagaaaaggaaatatcttcgtataaacactagacagaatcattctcagaaactgctctgcgatgtgtgcgttcaactctcagagtttaacttttcttttcattcagcagtttggaaacactctgtttgtaaagtctgcacgtggataacttgaccacttagaggccttcgttggaaacgggtttttttcatgtaaggctagacagaagaattcccagtaacttccttgtgttgtgtacattcaactcacagagttgaacgttcccttagacagagcagatttgaaacactctttttctgcaattggcaaatggagatttcaagcgctttaaggtcaatggcagaaaaggaaatatcttcgtttcaaaactagacagaatgattctcagaaactcctttgtgatgtgtgcgttcaactcacagagttcaacctttcttttcatagagcagttgggatacactctgtttgtaaagtctgcaagtggatattcagacttctttgaggccttcgttggaagcgggatttcttcatattctgctagacagaagaattctcagtaacttcctcgtgttgtgtgtattcaactcacagagttgaacgaacctttacacagagcagacttgaaacactctttttgtggaatttgcaaatggagatttcagccactttgaggtcaatggttgaaaaggaaatatcttcatataaaaattagacagaatgattctcagaaactcctttgtgatgtgtgcgttcaactcacagagttcaacctttcttttcatagagcagttgggaaacactctgtttgtaaagtctgcaagtggatattcagacttctttgaggccttcgttggaagcaggatttcttcatgttctgctagacagaagaattctcagtaacttccttgtgttgtgtgtattcaactcacagagttgaacgatcctttacacagagcagtcttgaaacactctttttgtggaatttgcaagtggagatttctgacgctttgaggtcaatggtagaataggaaatatcttcctatagaaactagacagaatgattctcagaaacttctttgtgatgtgtgcgctcaactcacagagtttaacctttcttttcatagagcagttaggaaacactctgtttgtaaagtcagcaagtggatattcagacctctttgaggccttcgtaggaaacgggatttctgcatattatgctagacagaagaattcccagtaacttccttgtgttgtgtgtgttcaactcacagagttgaactttcatttacccagagcagatatgaaacactctttttgtggaatttgcaagtggagatttcaagcgctttgaggccaaaggcagaaaaggaaatatcttcgtataaaaactagacagaatcattctcagaaactgctctgtgatgtgtgcgttcatctctcagagtttaacttttcttttcattcagcagtttggaaacactctgtttgtaaagtctgcacgtggataatttgatcacttagaggccttcgttggaaacgggtttttttcatgtaaggctagacagaagaattctcagtaacttccttctgttgtgtgtattcaactcacagagttgaacgatcctttacacagagcagacttgtaacactctttttgtggaatttgcaagtggagatttcagccgctttgaagtcaaaggtagaaaaggaaatatcttcctataaaaaatagacagaatgattctcagaaacttctttgtgatgtgtgcgttcaactcacagagtttaacctttcttttcatagagcagttaggaaacactctgtttgtaaactctgcaaatggatgttcagacctctttgaggccttcgttggaaacgggatttcttcatactatgctagacagaagaattctcagtaacttccttgtgttgtgtgtattcaactcacagagttgaaccgatcctttacacagagcagacttgaaacactctttttgtggaatttgcaagtggagatttcagccgctttgaggtcaatggtagaaaaggaaatatcttcctataaaaactagacagaatgattctgagaaactcctttgtgatgtgtgcgttcaactcacagagtttaacctttcttttcatagagcagttaggaaacactctgtttgtaaagtctgcaagtggatattcagacctccttgaggccttcgttggaaacgggttttcttcatattatgctagacagaagaattcccagtaacttccttgtgttgtgtgtgttcaactcacagagttgaactttcatttacacagagcagatttgaaactctctttttgtggaatttacaaatggagatttcaagcgctttgaggccaaaggcagaaaaggaaatatcttcgtataaaaactagacagaatcattctcagaaactgctctgcgatgtgtgcgttcaactctcagagttcaacttttcttttcattcagcagtttggaaacactctgtttgtaaagtctgcacgtggataatttgactacttagaggccttcgttggaaacgggtttttttcatgtaaggctagacagaagaattcccagtaacttccttgtgttgtgtgcgttcaactcacagagttgaactttcatttacacagagcagatttgaaacactctttttgtggaatttgcaaatggagatttcaagcgctttgaggccaaaggcagaaaaggaaatgtcttcgtttcaaaactagacagaatgattctcagaaaatcttttgtgatgtgtgcgttcaactcacagagtttaacctttcttttcatagagcagttaggaaacactctgtttgtaaagtctgcaagtggatattcagacctccttgaggccttcgttggaaacgggatttcttcatattctgctagacagaagaattctcagtaacttaccttgtgttgtgtgtattcaactcacagggttgaacgatcctttacacagagcagacttgaaacactctttttgtggaatttgcaagtggcgatttcagcctctttgaggtcaatggtagaataggaaatatcttcctatagaaactagacagaatgattttcataaactccttagtgatgtgtgcgttcaactcacagagtttaacctttctgttcatagagcaattaggaaacactctgtttgtaaagtctgcaagtggatattcagacccctttgaggccttcgttggaaacgggatttcttcatattatgctagacagaaaaattctcagtaacttccttgtgttgtgtgtattcaactgacagagttgaactttcatttagagagagcagatttgaaacactgtttttgtggaatttgcaagtggagatttcaagcgctttggggccaaaggcagaaaaggaaatatcttcgtataaaaactagacagaatcattctcagaaactgctgcgtgatgtgtgcgttcaactctcagagttcaacttttcttttcattcagcggtttggaaacactctgtttgtaaagtctgcacgtggatattttgaccacttagaggccttcgttggaaacgggttttttcatgtaaggctagacagaagaattcccagtaacttccttgtgttgtgtgcattcaactcacagagttgaacgttcccttagacagagcagatttgaaacactctatttgtgcaatttgcaagtatagatttcaagcgctttaaggtcaatggcagaaaaggaaatatcttcgtttcaaaactagacagaatcattcccacaaactgcgttgtgatgtgttcgttcaactcacagagtttaacctttctgttcatagagcagttaggaaacactctgttgtaaagtctgtaagtggatattctgacatcttgtggccttcgttggaaacgggatttcttcatattctgctagacagaagaattctcagtaacttccttgtgttgtgtgaattcaactcacagagttgaacgatcctttacacagagcagacttgaaacactctttttgtggaatttgcaggtggagatttcagccgctttttgttcaatggtagaataggaaatatcttcctatagaaactagacagaatgattctgagaaactcctttgtgatgtgtgtgttcaactcacagagtttaacctttgctttcatagagcagttagtaaacactctgtttataaagtctgcaagtgaatattcagacccctttgaggccttcgttggaaacgggatttcttcatattatgctggacagaagaattatcagtaacttccttgtgttgtgtgtattcaactcacagagttgaacgatcctttacacagagcagacttgaaacactctttttgtggaaattgcaagtggagatttcagccgctttgaggtcaatggtagaataggaaatatcttcctatagaaactagacagaatgattctcagaaactcctttgtgatgtatgtgttcaactcacagagtttaacctttcttttcattgagcagttaggaaacactctgtttgttaagtctgcaagtggatattcagacctctttgaggccttcgatggaaacgggtttttttcatataaggctagacagaagaattcccagtaacttccttgtgttgtgtgtgttcaactcacagagttgaactctcatttacacagagcagatttgaaacactctttttgtggaatttccaagtggagatttcaagtgctttgaggccaaaggcagaaaaggaaatatcttcgtataaaaactagacagaatcattctcagaaactgctctgcgatgtgtgcgttcaactctcagagtttaacttttcttttcattcagcagtttggaaacactctgtttgtaaagtctgcacgtggataacttgaccacttagaggccttcgttggaaacgggtttttttcatataaggctagacagaagaattcccagtaacttccttgtgttgtgtgcattcaactcacagagttgaacgttcccttagacagagcagatttgaaacactctatttgtgcaatttgcaagtgtagatttcaagcgctttaaggtcaatggcagaaaaggaaatatcttggtttcaaaactagacagaatcattcccacaaactgcgttgtgatgtgttcgttcaactcacagagtttaacctttcttttcatagagcagttaggaaacactctgtttgtaaactctgcaagtggatattcagacctctttgaggccttcgttggaaacgggatttcttcatactatgctagacagaataattctcagtaacttccttgttttgtgtgtattcaactcacagagttgaacgatcctttacagagagcagacttaaaacactctttttgtggaatttgcaagtggagatttcagccgctttgaggtcaatggtagaataggaaatatcttcctatagaaactagacagaatgattctcagaaactcctttgtgatgtgtgcgttcaactcacagagtttaccctttcttttcatagagcagttaggaaacactctgtttgtaaagtctgcaagtggatattcagacatccttgaggctttcgttggaaacgggatttcttcatattctgctagaaagaagaattcccagtgacttccttgtgttgtgtgtgttcaactcacagagttgaacgttcccttagacagagcagatttgaaacactctttttgtggaatttgcaagtggagatttcaagcgctttgaggccaaaggcagaaaaggaaatatcttcgtataaaaactagacagaatcattctcagaaactgctgcgtgatgtgtgcgttcaactctcagagtttaacttttcatttcattcagcggtttggaaaccctctgtttgtaaagtctgcacgtggatattttgaccacttagaggccttcgttggaaacgggttttttgcatgtaaggctagacagaagaattcccagtaacttccttgtgttgtgtgcattcaactcacagagttgaacgttcccttagacagagcagatttgaagcactctatttgtgcaatttgcaagtgtagatttcaagcgctttaaggtcaatggcagaaaaggaaatatcttcatttcaaaactagacagaatgattctcagaaactcctttgtgatgtgtgcgttctactcacagagttcaacctttcttttcatagagcagttgggaaacactctgtttgtaaagtctgcaagtggatattcagacttctttgaggccttcgttggaagcgggatttcttcatattctgctagacagaagaattctcagaaacttccttgtgttgtgtgttttcaactcacagagttgaacgatcctttacacagagcagacttgaaacactccttttgtggaatttgcaagtggagatttcagccgctttgaggccaatggtagaataggaaatatcttcctatagaaactagacagaatgattctcagaaacttctttgtgatgtgtgcgttcaactcacagagtttaacctttcttttcatagagcagttaggaaacactctgtttgtaaagtctgcaagtggatattcagacctctttgaggccttcgttggaaacgggatttcttcatactgtgctagacagaagaattctcagtaacttccttgtgttgtgtgtattcaactcacagagttgaacgatcctttacacagagcggacttgaaacacactttttgtggaatttgcaaggggagatttcagccgcattgaggtcaatggtagaaaaggaaatatcttcgtataaaaactagacagaatcattctcagaaactgctctgcgatgtgtgcgttcaactctcagagtttaacttttcttttcattcagcagtttggaaacactctgtttgtaaagtctgcacgtggataaattgaccacttagaggccttcgttggaaacgggtttttttcacgtaaggctagacagaagaattctcagtaacttccttgtgttgtgtgtattcaactcacacagttgaacgatcctttacacagagcagacttgtaacactctttttgtggaatttgcaattggagatttcagccgctttgaagtcaaatgtagaaaaggaaatatcttcctataaaaactagacagaatgattctcataaactcctttgtgatgtgtgcgttcaactcacagagtttaacctttctgttcatagagcagttaggaaacactctgtttgtaaagtctgcaagtggatattcagacctccttgaggccttctttggaaacgggatttcttcatattctgatagacagaagaattctcagtaacttccttgtgttgtgtgtattcaactcacagagttgaacgatcctttacacagagcagacttgaaacactctttttgtggaatttgcaagaggagatttcagcagctttgaggtcaatggtagaaaaggaaactatcttcgtataaagactagacagaatgattctcagaaaatcctttgtgatgtgtgcgttcaactcacagagtttaacttttcttttcatagagcagttaggaaacactctgtttgtaaagtctgcaagtggatattcagacctctttgaggccttcgttggaaacgggatttcttcatattatgctagaccgaagaattctcagtaactgccttgtgttgtgtgtattcaactcacagagttgaacgatcctttacacagagcagacttgaaacactcttttggtggaatttgcaagtggagatttcagccgctttgaggtcaatggtagaataggaaatatcttcctatagaaactagacagaatgattctcagaaactcctttgtgatgtgtgcattcaactcacagagtttaacctttcttttcatagagcagttaggaaacactctgtttgtaaagtctgcaagtggatattcagacctctttgaggccttcgttggaaacgggatttcttcatattatgctagacagaagaattctcagtaacttccttgtgttgtgtgtattcaactcacagagttgaacgatcctttacacagagtagacttgaaacactctttttgtggaatttgcaagtggagatttcaaccgctttgaggtcaatggtagaaaaggaaatatcttcgtataaaaactagacagaatcattctcagaaactgctgcgtgatgtgtgcgttcaactctcagagtttaacttttcttttcattcagcggtgtggaaacactctgtttgtaaagtctgcacgtggatattttgaccacttagaggccttcgttggaaacgggtttttttcatgtaaggctagagaaaagaattcccagtaacttccttgtgttgtgtgcattcaactcacagagttgaacgttcccttagacagagcagatttcaaacactctatttgtgcaatttgcaagtgtagatttcaagcgctttaaggtcagtggcagaaaaggaaatatcttcgtttcaaaactagacagaatgattctcataaactcctttgtgatgtgtgcgttcaactcacaaagtttaacttttcttttcatagagcagttaggaaacactctgtttgtaaagtctgcaagtggatattcagacctctttgagaccttcgttggaaacgggatttcttcatattatgctagacagaataattctcagtaacttccttgtgttgtgtgtattcaactcacagagttgaacgatgctttacacagagcagacttgaaacattctttttgtggaatttgcaactggagatttcagccgctttgaggtcaatggtagaataggaaatatcttcctatagaaactagacagaatgattctcagaaactcctttgtgatgtgtgtgttcaactcacagagtttaacatttcttttcatagagcagttaggaaacactctgtttgtaaagtctgcaagtggatattcagacctctttgaggccttcgttggaaacgggtttttttaatataaggctagacagaacaattctcagtaacttccttgtgttgtgtgtattcaactcacagagttgaacgatcctttacacagagcagacttgaaacactatttttgtggaatttgcaagtggagatttcatccgctttgaggtcaatggtagaataggaaatatcttcctatagaaagtagacagaatgattctcagaaacttctttgtgatgtgtgcgttcaactcacagagtttaacctttcttttcatagagcagttaagaaacactctgtttgtaaagtctgcaagtggatattcagacatctttgagactctcgttggaaacgggatttcttcatattctgctagacagaagaattctcagtaacttccttgtgttgtgtgtattcaactgacagagttgaactttcatttagagagagcagatttgaaacactgtttttgtggaatttgcaagtggagatttcaagcgctttggggccaaaggcagaaaaggaaatatcttcctataaaaactagacagaatcattctctgaaactgctctgtgatgtgtgcgttcaactctcagagtttaacttttcttttcattcagcaatttggaaacactctgtttgtaaagtctgcacgtggatattttgaccacttagaggccttcgttggaaacgggtttttttcatgtaaggctagacagaagaattcccagtaacttccttgtgttgtgtgcattcaactcacagagttgaacgttcccttagacagagcagatttgaaacactctatttgtgcaatttgcaagtgtagatttcaagcgctttaaggtaatggcagaaaaggaaatatcttcgtttcaaaactagacagaatcattcccacaaactgcgttgtgatgggttcgttcaactcacagagtttaacctttctgttcatagagcagttaggaaacactctgtaaagtctgtaagtggatattctgacatcttgtggccttcgttggaaacgggatttcttcatattctgctagacagaagaattctcagaaacttccttgtgttgtgtgttttcaactcacagagttgaacgatcctttacacagagtagacttgaaacactctttttgtggaatttgcaagtggagatttcagctgctttgaggtcaatggtagaaaaggaaatatcttcctatagaaactagacagaatgattctcagaaactcctttgtgatgtgtgcgttcaactcacagagtttaaacctttcttttcatagagcagttaggaaacactctggttgtaaagtctgcaagtggatattcagacctctttgaggccttcgttggaaacgggatttcttcatattctgctagacagaagaattcccagtaacttccttgtgttgtgtgtgttcaactcacagaattgaactttcatttacacagagcagatttgaaacactctttttgtggaatttgcaagtggagatttcaagcgctttgaggccaaaggcagaaaaggaaatatcttcgtataaaaactagacagaatcattctcagaaactgctctgcgatgtgtgcgttcaactctcagagtttaacttttcttttcattcagcagtttggaaacactctgtttgtaaagtctgcacgtggatattttgaccacttaaaggccttcgttggaaacgggtttttttcctgtaaggctagacagaagaattcccagtaacttccttgtgttgtgtacattcaactcacagagttgaacgttcccttagacagagcagatttgaaacactctttttgtgcaattggcaagtggtgatttcagccgctttgtggtcaatggtataaaaggaaatatcttcgtataaaaactagacagaatgattctcagaaacttcattgtgacgtgtgcgttcaactcacagagtttaacctttcttttcatagagcagttaggaaacactctgtttgtaaactctgcaagtggatattcagacctctttgaggccttcgttggaaacgggatttcttcatactgtgctagacagaagaattctcagtaacttccttgtgctgtgtgtattcaactcacagagttgaacgatcctttacacagagcagacttgaaacactctttttgtggaatttgcaagtggagatttcagccgctttgaggtcaatagtagaaaaggaaatatcttcgtagaaaaactagacagaatgattctcagaaactccttggtgatgtgtgcgttcaactcacagagtttaacttttcttttcatagagcagttaggaaacactctgtttgtaaagtctgcaagtggatattcagacctctttgaggccttcgttggaaacgggatttcttcatattatgctagacagaagaattcccagtaacttccatgtgttgtgtgtgttcaactcacagagttgaactgtcatttacacagagcagatttgaaacactgtttttgtggaatttgcaaatggagatttcaagcggtttgaggccaaaggcagaaaaggaaatatcttcgtataaaaactagacagaaatcattctcagaaactgctctgcgatgtgtgcgttcaactctcagagtttaacttttcttttcattcagaagtttggaaacactctgtttgtaaagtctgcacgtggataacttgaccacttagaggccttcgttggaaacgggtttttttcctgtaaggctagacagaagaattctcagtaacttccctgtgttgtgtgtattcaactcacagagttgaacgatccgttacacagagcatacttgaaacactcttcttgtggaatttgcaagtggagatttcagccgctttgaggtcaatggtagaataggaaatatcttcctatagaaactagacagaatgattctcagaaactcctttctgatgtgtgcgttcaactcaaagagtttaacctttcttttcgtagagcagctaggaaacactctgtttgtaaagtctgcaagtggatattcagacctctttgaggcctacgttggaaacgggatttcttcatattatgatagacagaagaattctcagtaacttccttgtgttgtgtgtattcaactgacggatttgaactttcatttagagagagcagatttgtaacactgtttttgtggaatttgcaagtggagatttcatgcgctttggggccaaaggcagaaaaggaaatatcttcgtataaaaactagacagaatcattcccagaaactgtgtagtgatgtgtatgtttaactcacagagtttaacatttcttttcatagagcagttgggaaacgctctgtttgaaaagtctgcctgtggatatttggaccgccatgaggcgttctttggaaatggtatttcttcatttaaggctacacagaagaattctcagaatcttcccttgtgttgtgtgtattcaactcacagagttgaacgatcctttacacagagcagatttgaaacactctttttgtggaatttgcaagtggagatttcagccgctttgaggtcaatggtagaaaatgaaatatcttcgtataaaaactagacagaatgattctcagaaactcctttgtgatgtgtgcgttgaactcacagagtttaagctttcttttcatagagtagttaggaaacactctgtttgtaaaatctgcaagtggatattcagacctctttgaggccttcgttggaaacgggatttcttcatattatgctagacagaagaattctcagaaacttcgttgtgttgtgtgttttcaaatcacagagttcaacgatcctttacagagagtagacttgaaacactctttttgtggaattggcagggtggagatttcagccgctttgaggtcaatggtagaaaaggaaatatcttcgtataaaaactagacagaatgattctcagaaactcctttgtgatgtgtgtgttcaactcacagagtttaacctttcttttcatagagcagttaggaaacactctgtttgtaaagactgcaagtggatattcaggcctctttgaggccttctttggaaacgggtttttttcatataaggctagacagaagaattcccagtaacttccttgtgttgtgtgtattcaactcacagagttgaactttcatttacacagagcagatttgaaacactctttttgtggaatttgcaaatggagatttcaagccctttcaggccaaaggcagaaaaggaaatatcttcgtataaaaactagacagaatcattctcagaaactgctctgcgatgtgtgcgttcaactctcagagtttaacttttcttttcattcagcagtttggaaacactctgtttgtaaagtctgcacgtggataacttgaccacttagaggccttcgttggaaacgggtttttttcctgtaaggctagacagaagaattcccagtaacttccttgtgttgtgtacaatcaactcacagagttgaacgttcccttagacagagcagatttgaaacactctttttgtgcaattggcaaatggagatttcaagcgctttaaggtcaatggcagaaaaggaaatatcttcgtttcaaaactagacagaatcattcccacaaactgcgttgtgatgtgttcgttcaacctacagagtttaacctttcttttcatagagcagttaggaaacagtctgtttgtaaattctgtaagtggatattctgacatcttgtggccttggttggaaacgggatttcttcatattctgctagacagaagaattctcagaaacttccttgtgttgtgtgttttcaactcacagagttgaacgatgctttacagagagtagacttgaaacactctttttgtggaatttgcaagtggagatttcagccgctttgaggtcaatggtagaataggaaatatcttcctatagaaactagacagaatgattctcagaaactcctttgtgatgtgtgcgttcaactcacagagtttaacctttcttttcatagagcagttgggaaacactctgtttgtaaagtctgcaagtagatattcagacatccttgaggctttcgttggaaacgggatttcttcatattctgctagaaagaagaattctcagtaacttccttgtgttgtgggtattcaactcacagagttgaacgatcctttacacagagcagacttgaaacactctttttgtggaatttgcaagtggagatttcagccgctttgaggtcaatggtagaataggaaatatcttcctatagaaactagacagaatcattctcagaaactgctctgcgatgtgtgcgttcaactctcagagtttaacttttcttttcattcagcagtttggaaacactctgtttgtgaagtctgcacgtggatattttgtccacttagaggccttcgttggaaacgggtttttttcctgtaaggctagacagaagaattcccagtaacttccttgtgttgtgtgcattcaactcacagagttgaacgttcccttagacagagcagatttgaaacactctatttgtgcaatttgcgagtgtagatttcaagcgctttaaggtcaacggcagaaaaggaaatatcttcgtttcaaaactagacagaatcattcccacaaactgcgttgtgatgtgttcgttcaactcacagagtttaacctttctgttcatagagcagttaggaaacactctgtttgtaaagtctgcaagtggatattcagacctcctagaggccttcgttggaaacgggatttcttcgtattctgctagacagaagaattctcagtaacttccttgtgttgtgtgtatgcaactcacagagttgaacaatcctttacacagagcagacttgaaacactccttttgtggaatttgcaagtggagatttcagccgctttgaggtcaatggtagaaaaggaaactatcttcttataaagactagacagaatgattctcagaaacttctttgtgatgtgtgcgttcaactcacagagtttaacctttcttttcatagagcagttaggaaacactttgtttgtaaagtctgcaagtggatatacagacctctttgaggccttcgttggaaacgggatttcttcatactatgctagacagaagaattcccagtaacttccttttgttgtgtgtgttcaactcacagagttgaactttcatttacacagagcagattggaaacactctttttgtggaatttgccagtggagatttcaagcgcattgaggccaaaggcagaaaaggaaatatcttcgtataaaaactagacagaatcattctcagaaactgctgcgtgatgtgtgggttcaactctcagagtttaacttttcttttcattcagcggtttggaaacactctgtttgtaaagtctgcacgtggatattttgaccacttagaggccttcgttggaaaagggtttttttcatgtaaggctagacagaagaattcccagtaacttccttgtgttgtgtacattcaactcacacagttgaacgttcccttagacagagcagatttgaaacactctttttgtgcaattggcaaatggagatttcaagcgctttaaggtcaatggcaggaaaggaaatatcttcgtttcaaaactagacagaatcattctcagaaactgctctgcgatgtgtgcgttcaactctcagagtttaaattttcttttcattcagcagtttggaaacactctgtttgtaaagtctgcacgtggataacttgaccacttagaggccttcgttggaaacgggtttttttcatgtaaggctagacagaagaattctcagtaacttccttgtgttgtgtgtattcaactcacagagttgaacgatcctttacacagagcagacttgtaacactctttttgtggaatttgcaagtggagatttcagccgctttgaagtcaaagatagaaaaggaaatatcttcctataaaaactagacagaatgattctcagaaactcctttgtgatgtgtgcgttcaactcacagagtttaaccttacttttcatagagcagttaggaaacactgtgtttgtaaagtctgcaagtggatattcagacctccttgaggccttcgttggaaacgggatttcttcatattatgctagacagaagaattcccagtaacttccttgtgttgtgtgtgttcaactcacagagttgaactttcatttacacagagcagatttgaaacactctttttgtggaatttgcaattggagatttcaagcgctttgaggccaaaggcagaaaaggaaatatcttcgtataaaaactagacagaatcattctcagaaactgctctgtgatgtgtccgttcaactctcagagtttaacttttcttttcattcagcagtttggaaacactctgtttgtaaagtctgcacgtggataatttgaccacttagaggccttcgttggaaacgggtttttttcatgtaaggctagacagaagaattcccggtaacttccttgtgttgtgtgcattcaactcacagagttgaacgttcccttagtcagagcagatttgaaacattctttttgtgcaatttgcaagtggagaattcaagcgctttaaggtcaatggcagaaaaggaaatatcttagtttcaaaactagacacaatcattcccacaaactgcgttgtgatgtgttcgttcaactcacagagtttaacctttctgttcttagagcagttaggaaacactctgtttgtaaagtctgtaagtggatattctgacatcttgtggccttcgttggaaacgggatttcttcatattctgctagacagaagaattctcagtaacttccttgtgttgtgtgtattcaactcacagagttgaacgatcctttacacagagcagacttgaaacactctttttgtggaatttgcaagtggagatttcagccgctttgaggtcaatggtagaaaaggaaacatcttcgtataaagactagacagaatgattatcagaaactcctttgtgatgtgtgcgttcaactcacagagtttaacctttcttttcatagagcagttaggaaacactctgtttgtaaagtctgcaagtggatattcagacctctttgaggccttcgttggaaacgggatttcttcatattctgctagacagaagaattctcagagtcttccttgtgttgtgtgtattcaactcacagagttgaacgatcctttacacagaggagacttgaaacactctttttgtggaatttgcaagtggagatttcagccgctttgaggtccatggtagaaaaggaaatatcttcgtataaaaactagacagaatgattcttagaaactcctttgtgatgtgtgcgttcaactcacagagtttaacctttcttttcatagagcagttaggaaacactctgtttgtaaagtctgcaagtggatattcagacctctttgaggccttcgttggaaacgggtttttttcatataaggctagacagaagaattcccagtaacttcccttgtgttgtgtgcattcaactcacagagttgaacattcccttagacagagcagatttgaaacactctatttgtgcaatttgcaagtgtagatttcaagcgctttaaggtcaacggcagaaaaggaaatatcttcgtttcaaaaccagacagaatcattcccacaaactgcgttgtgatgtgtacgttcaactcacagagtttaacctttctgttcatagagcagttaggaaacactctgtttgtaaagtctgtaagtggatattctgacatcttgtggccttcgttggaaacgggatttcttcatattctgctagacagaagaattctcagtaacttccttgtgttgtgtgtattcaactcacagagttgaacgatcctttacacagagcagacttgaaacactctttttgtggaatttgcaagtggagatttcagccgctttgaggtcaatagtagaaaaggaaatatcttcgtagataaactagacagaatgattctcagaaactcctttgtgatgtgtgcgttcaactcacagagtttaacctttcttttcatagagcagttaggaaacactctgtttgtaaagtctgcaagtggatattcagacctctttgaggccttcgttggaaacgggtttttttcatataaggctagacagaaggattcccagtaacttcccttgtgttgtgtgtgttcaactcacagagttgaactttcatttacaaagagcagatttgaaacactctttttgtggaatttgcaagtggagatttcaagcgctttgaggccaaaggcagaaaaggaaatatcttcgtataaaaactagacagaatcattctcagaaactgctgcgtgatgtgtgcgttcaactctcagagtttaacttttcttttcattcagcggtttggtaatactgtgtttgtaaagtctgcacgtggatattttgaccacttagaggccttcgttggaaacgggtttttttcatgtaaggctagacagaagaattcccagtaacttccttgtgttctgtgcattcaactcacagagttgaacgttcccttagacagagcagatttgaaacactctatttgtgcaatttgcaagtgtagatttcaagcgctttaaggtcaatggcagaaaaggaaatatcttcgtttcaaaactagacagaatcattcccacaaactgcgttgtgatgtgttcggttcaactcacagagtttaacctttcttttcatagagcagttaggaaacagtctgtttgtcaattctgtaagtggatattctgacatcttgtggccttcgttggaaacgggatttcttcatattctcctagacagaagaattctcagtaacttccttgtgttgtgtgtattcaactcacagagttgaacgatcctttacacagagcagacttgaaacactctttttgtgaaatttgcaagtggagatttcagccgatttgtggtcaatggtagaataggaaatatcttcctatagaaactagacagaatgattctcagaaacttctttgtgatgtgtgcgttcaactcacagagtttaacctttcttttcatagagcagttaggaaacactctgtttgtaaactctgcaagtggatattcagacctctttgaggccttcgttggaaaccggatttcttcatactgtgctagacagaagaattctcagtaacttccttgtgttgtgtgtattcaactcacagagttgaacgatcctttacacagagcagacttgtaacactctttttgtggaatttgcaagtggagatttcagccgctttgaggtcaatggtagaaaaggaaatatcttcctataaaaactagacagaatcattctcagaaactgctctgcgatgtgtgcgttcaactctcagagtttaactttgcttttcattcagcagtttggaaacactctgtttgtaaagtctgcacgtggataatttgaccacttagaggccttcgttggaaacgggtttttttcatgtaaggctagacagaagaattcccagtaacttccttgtgttgtgtgcattcaactcacagagttgaacgttcccttagacagagcagatttgaaaaactctatttgtgcaatttgcaagtgtagatttcaagcgctttaaggtcaacggcagaaaaggaaatatcttcgtttcaaaactagacagaatgattctcagaaactcctttgtgatgtgtgcgttcaactcacagagtttaacttttcttttcatagaccagttaggaaacactctgtttgtaaagtctgcaagtggatattcagacctctttgaggccttcgttggaaacgggatttcttcatattatgctagacagaataattctcagtaacttccttgtgttgtgtgtattcaactgacagagttgaacgatcctttacacagagcagacttgaaacactctttttgtggaatttgcaagtggagatttcagccgctttgaggtcaatagtagaaaaggaaatatcttcgtagaaaaactagacagaatgattctcagaaactcctttgtgatgtgtgcgttcaactcacagagtttaacctttcttttcatagagcagttaggaaacactctgtttgtaaagtctgcaagtggatattcagacttccttgaggccttcgttggaaacaggatttcttcatatttctgctagacagaagaattcccagtaacttcccttgtgttgtgtgtgttcaactcacagagttgaactttcatttacacagagcagatttcaaacactctttttgtggaatttgcaagtggagatttcaagcgctttgaggccaaaggcagaaaaggaaatatcttcgtataaaaactagacagaatcattctcagaaactgctctgtgatgtgtgcgttcaactctcagagtttaacttttcttttcattcagcagtttggaaacactctgtttgtaaagtctgcacgtggataatttgaccacttagaggccttcattggaaaagggtttttttcatgtaaggctagacagaagaattctcagtaacttccttgtgttgtgtgtattcaactcacagagttgaacgttcccttagacagagcagatttgaaacactctatttgtgcaatttgcaagtgtagttttcaagctctttaaggtcaacggcagaaaaggaaatatcttcgtttcaaaactagacagaatcattcccacaaactgcgttgtgatgtgttcgttcaactcacagagtttaacctttctgttcacagagcagttaggaaacactctgtttgtaaagtctgtaagtggatattctgacatcttgtggccttcgttggaaacgggatttcttcatattctgctagacagaagaattctcagaaacttcgttgtgttgtgtgttttcaactcacagagttcaacgatcctttacacagagtatacttgaaacactctttttgtggaattggcagggtggagatttcagccgctttgaggtcaatggtagaaaaggaaatatcttcgtataaaaactagacagagtgattctcagaaactcctttgtgatgtctgcgttcaactcacagagtttaaactttcttttcatagagcagttaggaaacactctgtttgtaaagtctgcaagtggatattcagacctccttgaggccttcgttggaaacgggatttcttcatattctgctatacagaagaattcccagtaacttccttgtgttgtgtgtgttcaactcacagagttgaactttcatttagacagagcagatttgaagcactctttttgtggaatttgcaagtagagatttcaagcgctttgaggccaaaggcagaaaaggtaatatcttcgtttcaaaactagccagaatcattctcagaaactgctctgcgatgtgtgcgttcaactctcagagtttgacttttcttttcattcagcagtttggaaacactctgtttgtaaagtctgcacgtggataatttgaccacttagaggccttcattggaaacgggtttttttcatgtaaggctagacagaagaattcccagtaacttaccttgtgttgtgtacattcaactcacagagttgaacgttcccttagacagagcagatttgaaacactctttttgtgcaattggcaagtggagatttcaagcgctttaaggtcaatggcagaaaaggaaatatcttcgtttcaaaactagacagaatcattcccacaaactgcgttgtgatgtgttcgttcaactcacagagtttaacctttcttttcctagagcagttaggaaacagtctgtttgtcaattctgtaagtggatattctgacatcttgtggccttcgttggaaacgggatttcttcatattctgctagacagaagaattctcagtaacttcatagtgttgtgtgtattcaactcacagatttcaacgatcctttacaaagagcagacttgaaacactctttttgtggaatttgcaagtggagatttcagccgctttgaggtcaatggtagaataggaaatatcttcctatagaaactagacagaatgattctcagaaacttctttgtgatgtgtgcgttcaactcacagagtttaacctttcttttcatagagcagttgggaaacactctgtttttaaagtctgcaagtggatattcagacctctttgaggccttcgttggaaacgggtttttttcatgtaaggctagacagaagaattctcagtaacttccttgtgttgtgtgtattcaactgacagagttgaactttcatttagagagagcagatttgaaacactgtttttgtggaatttgcaagtggagatttcaagcgctttggggccaagggcagaaaaggaaatatcttcgtataaaaactagacagaatcattctcagaaactgctgcgtgatgtgtgcgttcaactctcagagtttaacttttcttttcattcagcggtttcgaaacactctgtttgtaaagtctgcacgtggatattttgaccacttagaggccttcgttggaaacgggtttttttcatgtaaggctagacagaagaattctcagtaacttccttgtgttgtgtgtattcaactcacagagttgaacgatcctttacacagagcagacttgaaacattctttttgtggaatttgcaagtggagatttcaaccgctttgaggtcaatggtagaataggaaatatcttcctatagaaactagacagaacgattctcagaaactcctttctgatgtgtgcgttcaactcacagagtttaacctttcttttcatagagcagttaggaaacactctgtttgtaaagtctgcaagtggatattcagacctctttgaggccttcgttggaaacgggatttcttcatattctgctagacagaagaattctcagtaacttccttgtgttgtgtgtattcaactcacagagttgcacgaccctttacacagagcagacttgaaacactctttttgtggaatttgcaagtggagatttcagccgctttgaggtcaatagtagaaaaggaaatatcttcgtagaaaaactacacagaatgattctcagaaaatcttttgtgatgtgtgcgttcaacacacagagtttaacttttcttctcatagagcagttaggaaacactctgtttgtaaagtctgcaagtggatattcagacctctttgaggccttcgttggaaacgggatttcttcatattatgctagacagaagaattctcaggaacttccttgtgttgtgtgtattcaactgacagagttgaactttcatttagagagagcagatttgaaacactgtttttgtggaatttgcaagtggagattccaagcgctttggggccaaagccagaaaaggaaatatcttcgtagaaaaactagacagaatcattctcagaaactgctctgcgatgtgtgcgtccaactctcagagtttaacttttcttttcattcagcagtttgcaaacactctgtttgtaaagtctgcacgtggatattttgaccacttagaggccttcgttggaaacgggatttcttcatactatgctagacagaagaattctcagtaacttccttgtgttgtgtgtattcaactcacagagttgaacgatcctttacaaagagcagacttgtaacactctttttgtggaatttgcaagtggagatttcagccgctttgaagtcaaagatagaaaaggaaatatcttcctataaaaactagacagaatgattctcagaaactcctttgtgatgtgtgcgttcaactcacagagtttaaccttccttttcatagagcagttaggaaacactctgtttgtaaagtctgcaagtggatattcagacctccttgaggccttcgttggaaacgggatttcttcatattatgctagacagaagaattctcagtaacttccttgtgttgtgtgtattcaactcacagagttgaacgatcctttacacagagcggacttgaaacactcgttttgtggaatttgcaagtggagatttcagccgtgttgaggtaaatggtagaaaaggaaatatcttcgtataaaaactagacagaatgattctcagaaactcctttgtgatgtgttcgttcaactcacagagttcaacctttcttttcatagagcagttgggaaacactctgtttgtaaagtctgcaagtggatattcagacttctttgaggccttcgttggaagcgggatttcttcatattctgctagacagaagaattcccagtaacttccttgtgttgtgtgtgttcaactcacagagttgaactttcatttacacagagcagatttgaaacactctttttgtggaatttgcaaatggagatttcaagcgctttgaggccaaatgcagaaaaggaaatatcttcgtataaaaactagacagaatcattctcagaaactgctctgcgatgtgtgcgttcaaccctcagagtttaacttttcttttcattcagcagtttggaaacactctgtttgtaaagtctgcacgtggatattttgaccacttagaggccttcgttggaaacgggtttttttcctgtaaggctagacagaagaattcccagtaacttccttgtgttgtgtacattcaactcacagagttgaacgttcccttagacagagcagatttgaaacactctttttgtgcaattagcaagtggagatttcaagcgctttaaggtcaatggcagaaaaggaaatatcttactttcaaaactagacagaatcattccgacaaactgcgttgtgatgtgttcgttcaactcacagagtttaacctttctgttcatagagcagttaggaaacactctgtttgtaaagtctgtaagtggatattctgacatcttgtggccttcgttggaaacgggatttcttcatattctgctggacagaagaattctcactaacttccttgtgttgtgtgtattcaactcacagagttgaacgatcctttacacagagcagacttgaaacactctttttgtggaatttgcaagtggagatttcagtcgctttggggtcaatagtagaaaaggaaatatcttcgtagaaaaactagacagaatgattctcagaaactcctttgtgatgtgtgcgttcaactcacagagtttaacctttcttttcatagagcagttaggaaacactctgtttgtaaagtctgcaagtggatattcagacctccttgaggccttcgttggaaacgggatttcttcatatgatgctagacagaagaattcccagtaacttccttgtgttgtgtgtgttcaactcacagagtagaactttcatttacacagagcagatttgaaacactctttttgtggaatttgcaagtggagatttcaagcgctttgaggccaaaggcagaaaaggaaatatcttcgtataaaaactagacagaatcattctcagaaactgctctgcgatgtgtgcgttcaactctcagagtttaacttttcttttcattcagcagtttggaaacactctgtttgtaaagtctgcacgtggatattttgaccatttagaggccttcgttggaaacgggtttttttcttgtaaggctagacagaagatttcccagtaacttccttgtgttgtgtacattcaactcacagagttgaacgttcccttagacagagcagatttgaaacactctttttgtgcaattggcaagtggagatttcaagcgctttaaggtcaatggcagaaaaggaaatatcttcgtttcaaaactagacagaatcattcccacaaactgcgttgtgatgtgttcgttcaactcacagagtttaacctttctgttcatagagcagttaggaaacactgtgtttgtaaagtctgtaagtggatattcagacctccttgaggccttcgttggaaacgggatttcttcatattctgctagacagaagaattctcactaacttccttgtgttgtgtgtattcaactcacagagttgaacgatcctttacacagagcagacttgaaacactctttttgtagaattggcaagtggagatttcagccgctttgaggtcaatggtagaaaaggaaatatcttcgtataaagactagacagaatgattctcagaaactcctttgtgatgtgtgcgttcaactcacagagtttaacttttcttttcatagagcagttaggaaacactctgtttgtaaagtctgcaagtggatattcagacctctttgtggcctttgttggaaacgggatttcttcatattatgctagacagaagaattctcagtaacttccttgtgttgtgtgtattcaactgacagagttgaactttcatttagagagagcagatttgaaacactgtttttgtggaatttgcaaatggagatttcaagcgctttggggccaaaggcagaaaaggaaatatcttcgtataaaaactagaaagaatcattctcagaaactgctctgcgatgtgtgcgttcaactctcagagtttaacttttcttttcattcagcagtttggaaacactctgtttgtaaagtctgcacgtggatattttgaccacttagaggccttcgttggaaacgagattttttcctgtaaggctagacagaagaattcccagtaacttccttgtgttgtgtgcattcaactcacagagttgaaccttcccttagacagagcagatttgaaacactctatttgtgcaatttgcaagtgtagatttcaagcgctttaaggtcaatggcagaaaaggaaatatcttcgtttcaaaactagacagaatcattcccacaaactgcgttgtgatgtgctcgttcaactcacagagtttaacctttctgctcatagagcagttaggaaacactctgtttgtaaagtctgtaagtggatattctgacatcttgtggccttcgttggaaacgggatttcgtcatattctgctagacagaagaattctcagtaacttccttgtgttgtgtgtattcaactcacagagttgaacgatcgtttacacagagcagacttgtaacactctttttgtggaatttgcaagtggagatttcagccgctttgaagtcaaaggtagaaaaggaaatatcttcctataaaaactagacagaatgattctcatgaactcctttgtgatgtgtgcgttcaactcacagagtttaacctttcttttcatagagcagttaggaaacactctgtttgtaaagtctgcaggtggatattcagacctccttgaggccttcgttggaaacgggatttcttcatattctgctagacagaagaattcccagtaacttcccttgtgttgtgtgtgttcaactcacagagttgaactttgatttacacagagcagatttgaaacactctttttgtggaatttgcaagtggaaatttcaagcgctttgaggccaaaggcagaaaaggaaatatcttcgtataaaaactagacagaatcattctcagaaactgctctgcgatgtgtgcgttcaactctcagagtttaacttttcttttcattcagcagtttggaaacactctgtttgtaaagtctgcacgtggatattttgaccacttagaggccttcgttggaaacgggtttttttcctgtaaggctagacagtagaattcccagtaacttccttgtgttgtgtacattcaactcacagagttgaacgttcccttagacagagcagatttgaaacactctttttgtgcaattggcaaatggagatttcaagggctttaaggtcaatggcaggaaaggaaatatcttcgtttcaaaactagacagaatcattcccacaaactgcgttgtgacgtgttcgttcaactcacagagtttaacctttctgttcatagagcagttaggaaacactctgtttgtaaagtctgcaagtggatattcagacctccttgaggccttcgttggaaacgggatttcttcatattatgctagacagaggaattctcagtaacttccttgtgttctgtgtattcaactgacagagttgaacgatcctttacacagagcagacttgaaacactctttttgtggaatttgcaagtggagatttcagccgctttgaggtcaatggtagaaaaggaaactatcttcgtatacagactagacagaatgtttctcagaaactgctttgtgatgtgtgcgttcaactcacagagttcaacctttcttttcatagagcagttgggaaacactctgtttgtaaagtctgcaagtggatattcagacttctttgaggccttcgttggaagcgggatttcttcatattctgctagacagaagaattcccagtaacttaccttgtgttgtgtgtgttcaactcacagagatgaactctcatttacacagagcagatttgaaacactctttttgtggaatttgcaagtggagatttcaagcgctttgaggccaaaggcagaaaaggaaatatcttcgtataaaaactagacaaaatcattctcagaaactgctgcgtgatgtgtgcgttcaactctcagagtttaacttttcttttcattcagcggtttggaaacactctgtttgtaaagtcggcacgtggatattttgaccacttagaggccttcgttggaaacgggtttttttcatgtaaggctagacagaagaattcccagtaacttccttgtgttgtgtgcattcaactcacagagttgaacgttcccttagacagagcagatttgaaacactctatttgtgcaatttgcaagtgtagatttcaagcgatttaaggtcaatggcagaaaaggaaatatcttcgtttcaaaactagacagataatcattcccacaaactgcgttgtgatgtgttcgttcaactcacagagtttaacctttccgttcatagagcagttaggaaacacactgtttgtaaagtctgtaagtggatattctgacatcttgtggccttcgttggaaacgggatttcttcatattctgctagacagaaagaattctcagtaacttccttgtgttgtgtgtattcaactcacagcagttgaacgatcctttacagagagcagacttgaaacactctttttgtggaatttgcaagtggagatttcagccgctttgaggtcaatggtagaataggaaatatcttcctatagaaactagacagaatgattctcagaaactcctttgtgatgtgtgcgttcaactcacagagttcaacctttcttttcatagagcagttgggaaacactctatttgtaaagtctgcaagtggatattcagacttctttgaggccttcgttggaagcgggatttcttcatattctgcttgacagaagaattcccagtaacttcccttgtgttgtgtgtgttcaactcacagagttgaactttcatttacacagagcagatttgaaatactctttttgtggaatttgcaggtggagatttcaagcgctttgaggccaaaggcagaaaaggaaatatcttcgtataaaaactagacagaatcattctcagaaactgctctgtgatgtgtgcgttcaactctcagagtttaacttttcttttcattcagcagtttgtaaacactcagtttgtaaagtctgcacgtggatattttgaccactcagaggccttcgttggaaacgggtttttttcatgtaaggctagacagaagaattccgagtaacttccttgtcttgtgtgcattcaactcacagagttgaacgttcccttagacagagcagatttgaaacactctttttgtgcaatttgcaagtggagatttcaagcgatttagggtcaatggcagaaaaggaaatatcttcgtataaaaactagacagaatcattcccacaaactgcgttgtgatgtgttcgttcaactcacagagtttaacgtttctgttcatagagcagttaggaaacactctgtttgtaaagtctgcaagtggatattcagacctccttgaggccttcgttggaaacgggatttcttcatattctgctagacagaagaattctcagtaacttctttgtgttgtgtgtattcaactcacagagttgaacgatcctttacacagagcagtcttgaaacactctttttgtggaatttgcaagtggagatttctgccgctttgaggtcaatggtagaataggaaatatcttcctatagaaactagacagaatgattctcagaaactcctttgtgatgtgtgcgttcaactcacagagttcaacctttcttttcatagagcagttgggaaacactctgtttgtaaagtctgcaagtggatattcagacttctttgaggccttcgttggaagcggaatttcttcatgttctgctagacagaagaattctcagtaacttccttgtgttgtgtgtattcaactcacagagttgaacgatcctttacacagagcagacttggaacactctttttgtggaatttgcaagtggagatttcagccgcgttgaggtcaatggtagaaaaggaaatatcttcctataaaaactagacagaatgattctcagaaactcctttgtgatgtttgctttcaaatcacagagtttaacctttcttttcatagagcagttaggaaacactctggttgtaaagtctgcaagtggatattcagacctctttgaggccttcgttggaaacgggatttcttcatattctgctagacagaagaattcccagtaacttccttgtgttgtgtgtgttcaactcacagatttgaactttcatttacacagagcagatttgaaacactctttttgtggaatttgcaaatggagatttcaagcgctttgaggccaaaggcagaaaaggaaatatcttcgtataaaaactagacagaatcattctcagaaactgctctgcgatgtgtgccttcaactcacagagtttaacttttcttttcattcagcagtttggaaacactctgtttgtaaagtctgcacgtggatattttgaccacttagaggccttcgttgcaaacgggtttttttcctgtaaggctagacagaagaattcccagtaacttccttgcgttgtgtacattcaactcacggagttgaacgttcccttagacagagcagatttgaaacactctttttgtgcaattggcaagtggagatttcaagcgctttgaggtcaatggtagaaaaggaaatatcttcgtttcaaaactagacagaatcattcccacaaactgcgttgtgatgtgttcgttcaacacacagactttaacctttcttttcatagagcagttaggaaacagtctgtttgtaaattctgtaagtggatattctgacatcttgtggccttcgttggaaacgggatttcttcatattctgctagacagaagaattctcagtaacttccttgtgttgtgtgtattcaactcacagagttgaacgatcctttacacagagcagacttgaaacactctttctgtggaatttgcaagtggagatttcaaccgctttgaggtcaatagtagaaaaggaaatatcttcgtagaaaaactagacagaatgattctcagaaactcctttgtgatgtgtgtgttcaactcacagagtttaacctttcttttcatagagcagttagtaaacactctgtttataaagtctgcaagtggatattccaacccctttgaggccttcgttggaaacgggatttcttcatattatgctagacagaagaattcccagtaacttccttgtgttgtgtgtgttcaactcacagagttgaactttcatttacacagagcagatttgaaacactctttttgtggaatttgctaatggagatttcaagcgctttgaggccaaaggcagaaaaggaaatatcttcgtataaaaactagacagaatcattctcagaaactgctgcgtgatgtgtgtgttcaactctcagagtttaactttccttttcattcagcggtttggaaacactctgtttgtaaagtctgcacgtggatattttgaccacttagaggccttcgttggaaacgggtttttttgtatgtaaggctagacagaagaattcccagtaacttccttgtgttgtgcgcattcaactcacagagttgaacgttcccttagacagagcagatttgaaacactctatttgtgcaatttgcaagtgtagatttcaagcgctttaaggtcaagggcagaaaaggaaatatcttcgtttcaaaactagacagaatgattctcagaaactcctttgtgatgtgtgcgttcaactcacagagtttaacctttctgttcatagagcagttaggaaacactctgtttgtaaagtctgcaagtggatattcagacctccttgaggccttcgttggaaacgggatttcttcatattctgcttgacagaagaattctcagtaacttccttgtgttgtgtttattcaactcacagagttgaatgatcctttacacagagcagacttgaaacactctttttgtggaatttgcaagtggagatttcagccgctttgaggttaatggtagaaaagtaaatatcttcgtataaagactagacagaatgattctcagaaacttctttgtgatgcgtgcgttcaactcacagagtttaacctttcttttcatagagcagttaggaaacactctgtttgtaaactctgcaagtggatattcagacctctttgaggccttcgttggaaacgggatttcttcatactatgctagacagaagaattctcagtaacttctttgtgttgtgtgtattcaactgacagagttgaactttcatttagagagagcagatttggaacactgtttttgtggaatttgcaagtggagatttcaagcgctttggggccaaaggcagaaaaggaaatatcttcgtataaaaactagacagaatcattctcagaaaccgctctgtgatgtgtgcgttcaactcgcagagtttaacttttcttttcattcagcagtttggaaacactctgtttgtaaagtctgcacgtggatattttgaccacttagaggccttcgttggaaacgggttttttttcatgtaaggctagacggtagcattcccagtaacttccttgtgttgtgtgcattcaactcacagagatgaatgttcccttagacagagcagatttgaaacactctatttgtgcaatttgcaagtgtagatttcaagcgctttaaggtcaatggcagaaaaggaaatatcttcgtttcaaaactagacagaatcattcccacaaactgcgttgtgatgtgttcgttcaactcacagagtttaacctttctgttcatagagcagttaggaaacactctgtttgtaaagtctgcaagtggatattcagacctccttgaggccttcgttggaaaccggatttcttcatattctgctagacagaagaattctcagtaacttccttgtgttgtgtgtattcaactcacagagttgaacgatgctttacacagagcagacttgaaacactctttttgtggaatttgcaagtggagatttcagccgctttgaggtcaatggtagaaaaggaaatatcttcgtataaagactagacagaatgattctcagaaactcctttgtgatgtgtgtgttcaactcacagagtttaacctttcttttcatagagcatttagtaaacactctgtttataaagtctgcaagtggatattcagacccctttgaggccttcgttggaaacgggatttcttcatattatgctagacagaagaattcccagtaacttccttgtgttgtgtgtgttcaactcacagagttgaactttcatttacacagagcagatttgaaacactcttttcgtggaatttgcaaatggagatttcaagcgctttgaggccaaaggcagaaaaggaaatatcttcgtataaaaactagacagaatcattctcagaaactgctctgcgatgtgtgcgttcaactctcagagtttaactttgcttttcattcagcagtttggaaacactctgtttgtaaagtctgcacgtggataatttgaccacttagaggccttcgttggaaacgggtttttttcatgtaaggctagacagaagaattcccagtaacttccttgtgttgtgtgcattcaactcacagagttgaacgttcccttagacagagcagatttgaaacactctgtgcaatttgcaagtgtagatttcaagcgctttacggtcaatggcagaaaaggaaatatcttcgtttcaaaactagacagaatcattcccacaaactgcgttgtgatgtgttcgttcaactcacagagtttaacctttcttttcatagagcagttaggaaacaatctgtttgtaaattctgtaagtggatattctgacatcttgtggccttcgttggaaacgggatttcttcatattctgctagacagaagaattctcagtaacttccttgtgttgtgtgtattcaactcacagagttgaacgatcctttacacagagcagacttgtaacactctttttgtggaatttgcaagtggagatttcacccgctttgaagtcaaaggtagaaaaggaaatatcttcctataaaaactagacagaatgattctcagaaactcctttgtgatgtgtgcgttcaactcacagtgtttaacctttcttttcatagagcagttaggaaacactctgtttgtaaagtctgcaagtggatattcagacctccttgaggccttcgttggaaacgggattttttcatataaggctagacagaagaattcccagtaacttccttgtgttgtgtgtgttcaactcacagagttgaactttcatttacgcagagcagatttgaaacactctttttgtggaatttgcaagtggagatttcaagcgctttgaggccaaaggcagaaaaggaaatatcttcgtttcaaaactagacagaatgattctcagaaactcctttgtgatgtgtgcgttcaactcacagagtttaacttttcttttcattcagcggtttggaaacactctgtttgtaaagtctgcacgtggatattcagacctctttgaggccttcgttggaaacgggtttttttcatgtaaggctagacagaagaattcccagtaacttccttgtgttgtgtacattcaactcacagagttgaacgttcccttagacagagcagatttgaaacactctttttgtgcaattggcaagtggtgatttcagccgctttgaggtcaatggtagaaaaggaaatatcttcgtataaaaactagacagaatcattcccacaaactgcgttgtgatgtgttcgttcaactcacagcagtttaacctttctgttcatagagcagttaggaaacactctgtttgtaaagtctgtaagtggatattctgacatcttgtggccttcgttggaaacgggatttcttcatattctgctagacagaatacttctcagtaacttccttgtgttgtgtgtattcaactcacagagttgaacgatcctttacagagagcagacttgaaacactctttttgtggaatttgcaagtggagatttcagccgctttgagctcaatggtagaataggaaatatcttcctatagaaactagacagaatgattctcagaaactcctttgtgatgtgtgcgttcaactcacagagtttaacctttcttttcatagagcagttaggaaacactctgtttgtaaagtctgcaagtggatattcagacatctttgaggcgttcgttggaaacgggatttcttcatgttctgctagacagaagaattcccagtaacttccttgtgttgtgtgtgttcaactcacagagttgaactttcatttacccagagcagatttgaaacactctttttgtggaatttgcaagtggagatttcaagcgatttgaggccaaaggcagaaaaggaaatatcttcgtttcaaaactagacagaatcattctccgaagctgctgcgtgatgtgtgcgttcaactctcagagtttaacttttcttttcattcagcggtttggaaacactctgtttgtgaagtctgcacgtggatattttgaccacttagaggccttcgttggaaacgggttttttgcatgtaaggctagacagaagaattcccagtaacttccttgtgttgtgtacattcaactcacagagttgaacgttcccttagacagagcagatttgaaacactctttgtgcaattggcaagtggagatttcaagcgctttaaggtcaatggcagaaaaggaaatatcttcgtttcaaaactagacagaatgattctcagaaactcttttgtgatgtgtgcgttcaactcacagagtttaacctttcttttcatagagcagttaggaaacactctgtttgtaaagtctgcaagtggatattcagacatccttgaggctttcgttggaaacgggatttcttcatattatgctagacagaagaattctcagtaacttccttgtgttgtgtgtattcaactcacagagttgaacgatcctttacacagagcagacttgaaacactccttttgtggaatttgcaagtggagatttcagccgctttgaggtcaatggtagaataggaaatatcttcctatagaaactagacagaatgattctcataaactcctttgtgatgtgtgagttcaaatcacagagtttaacttttcttttcatagagcagttaggaaacactctgtttctaaagtctgcaagtggatattcagatctctttgaggccttcgttggaaacgggatttcttcatattatgctagacagaagaattctcaggaacttccttgtgttgtgtgtattcaactcacagagttgaactttcatttacacagagcagatttgaaacactctttttgtggaatttgcaaatggagatttcaagcgctttgaggccaaaggcagaaaaggaaatatcttcgtataaaaactagacagaatcattctcagaaactgctgcgtgatgtgtgcgttcaactctcagagtttaacttttcttttcattcagcggtttggaaacactctgtttgtaaagtctgcacgtggatattttgaccagttagaggccttcgttggaaacgggtttttttcatgtaaggctagacagaagaattctcagtaacttccttgtgttgtgtgtattcaactcacagagttgaacgatcctttacacagagcagacttgaaacaatctttttgtggaatttgcaagtggagatttcagccgatttgaggtcaatggtagaaaaggaaatatcttcgtataaaaactagacagaatgattctcagaaactcctttgtgatgtgtgcgttcaactcacagagtttaacctttcttttcatagagcagttaggaaacactctgtttgtaaagtctgcaagtggatattcagacctccttgaggccttcgttggaaacgggatttcttcattttatgctagacagaagaattctcagtaacttccttgtgttgtgtgtattcaactcacagagttgaacgatcctttacacagagcatacttgaaacactcttgttgtggaatttgcaagtggagatttcagccgctttgaggtcaatggtagaataggaaatatcttcctatagaaactagacagaatgattctcagaaactcctttgtgatgtgtgcgttcaagtcacagagtttaacctttcttttcatagagtagttaggaaacactctgtttgtaaagtctgcaagtggatattcagacctctttgaggccttcgttggaaacgggtttttttcatataaggctagacagaagaattcccagtaacttccttgtgttgtgtgtgttcaactcacagagttgaactttcatttacccagagcagatttgaaacactctttttgtggaatttgcaaatggagatttcaagcgctttgaggccaaaggcagaaaaggaaatatcttcgtttcaaaactagacagaatgattctcagaaactcctttgtgatgtgtgcgttcaactcacagagtttaacctttgttttcattcagcggtttggaaacactctgtttgtaaagtctgcacgtggatattcagacctctttgaggccttcgttggaaacgggtttttttcatgtaaggctagacagaagaattcccagtaacttccttgtgttgtgtgcattcaactcacagagttgaacgttcccttagacagagcagatttgaaacactctatttgtgcaatttccaagtgtagatttcaagcgctttaaggtcaacggcagaaaaggaaatatcttcgtttcaaaactagacagaatcattcccacaaactgcgttgtgatgtgctcgttcaactcacagagtttaacctttcttttcatagagcagttaggaaacagtctgtttgtaaattctgtaagtggatattctgacatcttgtggccttcgttggaaacgggatttcttcatattctgctagacagaagaattctcagaatcttccttgtgttgtgtgtattcaactcacagagttgaacgatcctttacacagagcagacttgaaacactctttttgtggaatttgcaattggagatttcagccgctttgaggtccatggtagaaaaggaaatatcttcgtataaaaactagacagaatgattctcagaaactcctttgtgatgtgtgcgttcaactcacagagtttaacctctcttttcatagagcagttgggaaacactctgtttgtaaagtctgcaagtggatattcagacatccttgaggctttcgttggaaacgggatttcttcatattctgctagaaagaagaattctcagtaacttccttgtgttgtgtgtattcaactgacagagttgaactttcatttagagagagcagatttataacactgtttttgtggaatttgcaagtggagatttcagccgctttggggccaaaggccgaaaaggaaatatcttcgtataaaaactagacagaatcattctcagaaaatgctctgtgatgtgtgcgttcaactctcagagtttaacttttcttttcattcagcactttggaaacactctgtttgtaaagtctgcacgtggatattttgaccacttagaggtctttgttggaaacgggtttttttcacgtaaggctagacagaagaattcccagtaacttccttgtgttgtgtgcattcaactcacagagttgaacgttcccttagacagagcagatttgaaacactctatttgtgcaatttgcaagtatagatttcaagcgctttaaggtcaacggcagaaaaggaaatatcttcgtttcaaaactagacagaatcattcccacaaactgcgttgtgatgtgttcgttcaactcacagaggttaacctttctgttcatagagcagttaggaaacactctgtttgtaaagtctgcaagtggatattcagacctccttgaggccttcgttggaaacgggatttcttcatattctgctagacagaagaattctcagtaacttccttgtgttgtgtgtattcaactcacagtgttgaacgatcctttacacagagcagactagaaacactctttttgtggaatttgcaagtggagatttcagccgctttgaggtcaatggtagaaaaggaaatatcttccctcctataaaaactagacagaatgattctcagaaactcctttgtgatgtgtgcgttctactcacagagtttaacctttcttttcatagagcagttaggaaacactctgtttgtaaagtctgcaagagaatattcagacatctttgagactttcgttggaaacgggatttcatcatattctgctagacagaagaattcccagtaacttccttgtgttgtgtgtgttcaactcacagagttgaactttcatttacccagagcagatttgaaacactcttttagtggaatttgcaagtggagatttcaagcgctttgaggccaaaggcagaaaaggaaatatcttcgtttcaaaactagacagaatcattctcagaaactgctgcatgatgtgtgcgttcaactctcagagtttaacttttcttttcattcagcggtttggaaacactctgtttgtaaagactgcacgtggatattttgaccacttagaggccttcgttggaaacgggttttttttcatgtaaggctagacagaagaattcccagtaacttccttgtgttgtgtacattcaactcacagagttgaacgttcccttagacagagcagatttgaaatactctttttgtgcaattggcaagtggagatttcaagagctttaaggtcaatggcagaaaaggaaatatcttcgtttcaaaactagacagaatcattcccacaaactgcgttgtgatgtgttcgttcaactcacagagtttaaactttctgttcatagagcagttaggaaacactctgtttgtaaagtctgtaagtggatattctgacatcttgtggccttcgttggaaacgggatttcttcatattctgcttgacagaagaattctcagtaacttccttgtgttgtgtgtattcaactcacagagttgaacgatcttttacacagagcagacttgaaacactctttttgtggaatttgcaagtggagatttcagccgctttcaggtcaatagtagaaaaggaaatatcttcgtagaaaaactagacagaacgattgtcagaaactcctttatgatgtgtgcgttcaactcacagagtttaacctttcttttcatagagcagttaggaaacactctgtttgtaaattctgcaagtggataatcagacctctttgaggccatcgttggaaacgggatttcctcatattctgctagacagaagaattcccaataacttccttgtgttgtgtgtgttcaactcacagagttgaactttcatttacacagagcagatttgaaacactctttttgtggaatttgcaagtggagatttcaagcgctttgaggccaaaggcagaaaaggaaatatcttcgtttcaaaactagacagaatcattctcagaaactgctctgcgatgtgtgcgttcaactctcagagtttaacttttcttttcattcagcagtttggaaacactctgtttgtaaagtctgcacgtggataatttgaccacttagaggtcttcgttggaaacgggtttttttcatgtaaggctagactgaagaattcccagtaacttccttgtgttgtgtacattcaactcacagagttgaacgttcccttagacagagcagatttgaaacactctttttgtgcaattggcaaatggagatttcaagcgctttaaggtcaatggcagaaaaggaaatatcttcgtttcaaaattagacagagaatcattcccacaaactgcgttgtgatgtgttcgttcaactcacagcagtttaacctttcttttcatagagcagttaggaaacagtctgtttgtaaattctgtaagtggatattctgacatcttgtggccttcgttggaaacgggatttcttcatattgtgctagacagaagaattctcagaatcttccttgtgttgtgtgtattcaactcacagagttgaacgatggtttacacagagcagatttgaaacactctttttgtggaatttgcaagtggacatttcagccgctttgaggtcaatggtagaaaaggaaatatcttcgtataaaaactagacagaatgattctcagaaactcctttgtgatgtgtgcgttctactcacagagtttaacctttcttttcatagagcagttaggaaacactctgtttgtaaagtctgcaagtggatattcagacatctttgagactttcgttggaaacgggatttcatcatattctgctagacagaagaattctcagtaacttccttgtgttgtgtgtattcaactgacagagttgaactttcatttagagagatcagatttgaaacactgtttttgtggaatttgcaagtggagatttcaagcgctttggggccaaaggcagaaaaggaaatatcttcgtataaaaagtagacagaatcattctcagaaactgctgcgtgatgtgtgcgttcaactctcagagtttaacttttcttttcattcagcggtttggaaacactctgtttgtaaagtctgcacgtggaaattttgaccacttagaggccttcgttggaaacgggtttttttcatgtaaggctagatagaagaattcccagtaacttccttgtgttgtgtacattcaactcacagatttgaacgttcccttagacagagcagatttgaaacactctttttgtgcaattggcaaatggagatttcaagcgctttaaggtcaatggcagaaaaggaaatatcttcgtttcaaaactagacagaatcattcccacaaactgcgttctgatgtgttcgttcaactcacagtagtttaacctttctgttcatagagcagttaggaaacactctgtttgtaaagtctgtaagtggatattctgacatcttgtggccttcgttggaaacgggatttcttcatattctgctagacagaagaattctcagtaacttccttgtgttgcgtgtattcaactcacagaggttgaacgatcctttacacagagcagacttgaaacactctttttgtggaatttgcaagtggagatttcagccgctttgaggtcaatatgtagaaaaggaaatatcttcgtagaaaaactagacagaaatgattctcagaaactcctttgtgatgtgtgtgttcaactcacagagtttaacctttcttttcatacagcagttaggaaacactctgtttgtaaattctgcaagtggatattttgaccgctttgaggccttcgttggaaacgggtttttttcatgtaaggctagacagaagaattctcagcaacttccttgtgttgtgtgtattcaactgacagagttgaactttcatttagagagagcagatttgaaacactgtttttgtggaatttgcaagtggagatttcaagcgctttggggccaaaggcagaaaaggaaatatcttcgtataaaaactagacagaatcattctcagaaactgctctgtcatgtgtgcgttcaactctcagagtttaacttttcttttcattcagcagtttggaaacactctgtttgtaaagtctgcacgtggatatttttaccacttagaggtcttcgttggaaacgggtttttttcatgtaaggctagacagaagaattcccagtaacttccttgtgttgtgtgcattcaactcacagagttgaacgttcccttagacagagcagatttgaaacactctatttgtgcaatttgcaagtgtagatttcaagcgctttaaggtcaacggcagaaaaaggaaatatcttcgtttcaaaactagacagaatgattctcagaaacttctttgtgatgtgtgcgttcaactcacagagtttaacctttcttttcatagagcagttaggaaacactctgtttgtaaagtctgcaagtggatatacagacctctttgaggccttcgttggaaacgggatttcttcatactatgctagacagaagaattctcagtaacttccttgtgttgtgtgtattcaactcacagagttgaactatcctttacacagagcagacttgaaacactcgttttgaggaatttgcaagtggagatttcagccgctttgaggtcaatggtagaaaaggaaatctcttcgtataaaaactagacagaatgattctcagaaactcctttgtgatgtgtgcgttcaactcacagagtttaacttttcttttcatagagcagttaggaaaaactctgtttgtaaagtctgcaagtggatattcagacctctttgaggccttcgttggaaacgggatttcttcatattctgctagacagaagaattcccagtaacttccttgtgttgtgtgtgttcaactcacagagttgaactttcatttacacagagcagatttgaaacactctttttgtggaatttgcaagtggagatgtcaagcgctttgaggccaaaggcagaaaaggaaatatcttcgtttcaaaactagacagaatcattctcagaaactgctgtgtgatgtgtgcgttcaactctcagagtttaacttttcttttcattcagcggtttggaaacactctgtttgtaaagtctgcacgtggaaattttgaccacttagaggccttcgttggaaacgggtttttttcatgtaaggctcgacagaagaattcccagtaacttccttgtgttgtgtgcattcaactcacagagttgaacgttcccttagacagagcagatttgaaacactctctttgtgcaatttgcaagtgtagatttcaagcgctttaaggtcaatggcagaaaagaaaatatcttcgtttcaaaacaagacagaatgattctcagaaactcctttgttatgtgtgcattcaactcacagagtttaccctttcttttcatagagcagttaggaaacactctgtttgtaaagtctgccagtggatattcagacatccttgaggctttcgttggaaacgggatttcttcatattctgccagaaagaagaattctcagtaacttccttgtgttgtgtttattcaactcacagagttgaatgatcctttacagagagcagacttgaaacactctttttgtggaatttgcaagtggagatttcagccgctttgaggtcaatggtagaaaggtaaatatcttcgtataaagactagacagaaatgattctcagaaacttctttgtgatgtgtgcgttcaactcacagagtttaacctttcttttcatagagcagttaggaaacactctgtttgtaaactctgcaagtggatattcagacctgtttgaggccttcgttggaaacgggatttcttcatactatgctagacagaagaattctcagtaacttccttgtgttgtgtgtattcaactgacggagttgaactatcatttagagagagcagatttgaaacactgtttttgtggaatttgcaagtggagatttcaagcgctttggggccaaaggcagaaaaggaaatatcttcgtataacaactagacagaatcattctcagaaactgctgcgtgatgtgtgcgttcaactctcagagtttaacttttctttttattcagcggtttggaaacactctgtttgtaaagtctgcacgtggatattttgaccacttagaggccttcgttggaaacgggtttttttcatgtaaggctagacagaagaattcccagtaacttccttgtgttgtgtgcattcaactcacagagttgaacgttcccttagacagagcagatttgaaacactctgtttgtgcaatttgcaagtgtagatttcaagcgctttaaggtcaatggcagaaaaggaaatatcttcgtttcaaaactagacagaatcattcccacaaactgcgttgtgatgtgttcgttcaactcacagagtttaacctttctgttcatagagcagttaggaaacactctgtttgtaaagtgtgtaagtggatattctgacatcttgtggccttcgttggaaacgggatttcttcatattctgctagacagaagaattctcagtaacttccttgtgttgtgtgtattcaactcacagagttgaacgatcctttacagagagcagacttgaaacactctttttgtggaatttgcaattggagatttcagccgctttgaggtcaatagtagaaaaggtaatatcttcgtagaaaaactagacagaatgattctcagaaacttctttgtgatgtgtgcgttgaactcacagagtttaaccttttttttcatagagcagttaggaaacactctgtttgtaaactctgcaagtggataatcagacctctttgaggccttcgttggaaacgggatttcttcatactatgctagacagaagaattctcagtaacttccttgtgttgtgtgttttcaactcacagagttcaacgatgctttacacagagtagacttgaaacactctttttgtgtaatttgcaagtggagatttcagccgctttgaggtcaatggtagaaaaggaaatatcttcgtataaaaactagacagagtgattctcagaaactcctttgtgatgtctgcgtttaactcacagagtataacctttcttttcatagagcagttaggaaacactctgtttgtaaagtctgcaagtggatattcagacctccttgaggccttcgttggaaacgggatttcttcatattatgctagacagaagaattctcagtaacttccttgtgttgtgtgtattcaactcacagagttgaaggatcctttacacagagcagactagaaacattctttttgtggaatttggaagtggagatttcagccgctttgaggtcaatggtagaataggaaatatcttcctatagaaactagacagaatgattctcagaaactcctttgtgatgtgtgcgttcaactcacagagtttaacctttcttttcatagagcagttaggaaacactctgattgtaaagtctgcaagtggatattcagacctccttgaggccttcgttggaaacgggatttcttcatattatgctagacagaagaattcccagtaacttccttgtgttgtgtgtgttcaactcacagagttgaactttcctttacacagagcagatttgaaacactctttttgtggaatttgcaagtggagatttcaagcgctttgaggccaaaggcagaaaaggaaatatcttcgtttcaaaactagacagaatcattctcagaaactgctctgtgatgtgtgcgttcaactctcagagtttaacttttcttttcattcagcagtttggaaacactctgtttgtaaagtctgcacgtggatattttgaccacttagaggccttcgttggaaacggtttttttcatgtaaggctagacagaagaattctcagtaacttccttgtgttgtgtgtattcaactcacagagttgaacgatcctttacacagagcagacttgtaacactctctttgtggaatttgcaagtggagatttcagccgctttgaagtcaaaggtagaaaaggaaatatcttcctataaaaactagacagaatcattcccacaaactgcgttgtgatgtgttcgttcaactcacagagtttaacctttctgttcatagagcagttaggaaacactctgtttgtaaagtctgtaagtggatattctgacattttttggccttcgttggaaatgggatttcttcatattctcctagacagaattctcagtaacttccttgtgttgtgtgtattcaactcacagagttgaacgatcctttgcacagagcagacttggaacactctttttgtggaatttgcaagtggagatttcagccgctttgaagtcaaaggtagaaaaggaaatatcttcctataaaaactagacagaatgattctcagaaacttctttgtgatgtgtgcgttcaactcacagagtttaacctttcttttcatagagcagttaggaaacactctgtttgtaaactctgcaagtggatattcagacctccttgaggccttcgttggaaacgggatttcttcatactgtgctagaccagaagaattctcagtaactttccttgtgttgtgtgtattcaactgacagagttgaactttcatttggagagagcagatttgaaacactgtttttgtggaatttgcaagtggagatttcaagcgctttggggccaaaggcagaaaaggaaatatcttcgtataaaaactagacagaaatcattctcagaaactgctctgcgatgtgtgcattcaactctcagtagtttaatttttcttttcattcagcagtttggaaacactctctttgtaaagtctgcacgtggatattttgaccacttagaggccttcgttggaaacgggttttattcttgtaaggctagacagaagaattcccaggaacttccttgtgttgtgtacattcaactcacagagttgaacgttcccttagacagagcagatttgaaacactctttttgtgcaattggcaagtggtgatttcagccgctttgtggtcaatggtagaaaaggaaatatcttcgtataaaaactagacagaatcattcccacaaactgcgttgtgatgtgttcgttcaactcacagagtttaacctttcttttcatagagcagttaggaaacagtctgtttgtcaattctgtaagtggatattctgacatcttgtggccttcgttggaaacgggatttcttcatatttggctagacagaagaattctcagtatcttccttgtgttgtgtgtattcaactcacagagttgaacgctcctttacacagagcagacttgaaacactctttttgtggaatttgcaagtggagatttaagccgctttgaggtcaatggtagaaaagggaatatcttcgtatagaaactagacagaatgattctcagaaactcctttgtgatgtgtgcgttcaactcacacagtttaacctttcttttcatagagcagttaggaaacactctgtttgtaaagtctgcaagtggatattcagacctccttgaggccttcgttggaaacgggatttattcatattatgctagacagaagaattcccagtaacttccttgtgttgtgtgtgttcaactcacagagttgaactttcatttacacagagcagatttgaaacactctttttgtggaatttgcaagtggagatttcaagcgctttgaggccagaggcagaaaaggaaatatcttcgtttcaaaactagacagaatgattctcagaaactgctgcgtgatgtgtgcgttcaactctcagagtttaacttttcttttcattcagcggtttggaaacactctgtttgtaaagtctgcacgtggatattttgaccacttagaggccttcgttggaaacgggtttttttcatgtaaggctagacagaagaattcccagtaacttccttgtgttgtgtacattctactcacagagttgaacgttcccttagacagagcagatttgaaacactctttttgtgcaattggcaagtggtgatttcaaccgctttgaggtcaatggtagaaaaggaaatatcttcgtataaaaactagacagaatgattctcagaaactcctttgtgatgtgtgcgttcaaatcacagagtttaacttttcttttcatagagcagttaggaaacactctgtttgtaaagtctgcaagtggatattcagacctctttgaggccttcgttggaaacggaatttcttcatattatgctagacagaagaattctcagtaacttccttgtgttgtgtgtattcaactcacagagttgaacgatcgtttacacagagcagacttgaaacattctttttgtggaatttgcaagtggagatttcagccgctttgaggtcaatggtagaataggaaatatcttcctatagaaactagacagaatgattctcagaaactcctttgtgatgtgtgtgttcaactcacagcagtttaacctttcttttcatagagcagttaggaaacgctctgtttgtaaagtctgcaagtggatattcagacctcgttgagaccttcgttggaaacgggatttcttcatattctgctagacagaagaattctcagaatctcccttgtgttgtgtgtattcaactcacagagttgaacgatcctttacacagagcagacttgaaacactctttttgtggaatttgcaagtggagatttcagccgctttgaggtccatggtagaaaaggaaatatcttcgtataaaaacaagacagaatggttctcagaaactcctttgtgatgtgtgcgttcaactcacagagtttaacttttcttttcatagagcagttaggaaacactctgtttgtaaagtctgcaagtggatattcagacctctttgaggccttcgttggaaacgggatttcttcatattctgctagacagaagaattcccagtaacttccttgtgttgtgtgtgttcaactcacagagttgaactttcatttacacagagcagatttgcaacactctttttgtggaatttgcaaatggagatttcaagcgctttgaggccaaaggcagaaaaggaaatatcttcgtttcaaaactagacagaatcattctcagaaacttctctgcgatgtgtgcgttcaactctcagagtttaacttttcttttcattcagcagtttggaaacactctctttgtaatgtctgcacgtggatattttgaccacttagaggccttcgttggaaacgggtttttttcctgtaaggctagatagaagaattcccagtaacttccttgtgttgtgtacattcaactcacagagttgaacgttcccttagacagagcagatttgaaacactctttttgtgcaattggcaagtggagatttcaagcgctttgaggtcaatggcagaaaaggaaatatcttcgtttcaaaactagacagaatgattctcagaaactcctttgtgatgtgtgcgttcaactcacagagtttaactttccttttcatagagcagttaggaaacactctgtttgtaaagtctgcaagtggatattcagacctctttgaggccttcgttggaaacgggatttcttcatattctgcttgacagaagaattctcagtaacttccttgtgttgtgtgtattcaagtcacagagttgaacgatcctttacacagagcagacttgaaacactctttttgtggaatttgcaagtggagatttcagccgctttgaggtcaatagtagaaaaggaaatatcttcgtagaaaaactagacagaatgattctcagaaattcctttgtgatgtgtgtgttcaactcacagagtttaacctttcttttcatagagcagttaggaaacactctgtttgtaaagtctgcaagtggatattcagacctctttgaggccttcgttggaaaagggatttcttcatgctctgctagacagaagaattctcagtaacttccttgtgttgtgtgtattcaactgacagagttgaactttcatttggagagagcagatttgaaacactgtttttgtggaatttgaaagtggagatttcaagcgctttggggccaaaggcagaaaaggaaatatcttcgtagaaaaactagacagaatcattctcagaaactgctctgtgatgtgtgcgttcaactctcagagtttaacttttcttttcattcagcagtttggaaacactctgtttgtaaagtctgcacgtggatattttgaccacttagaggccttcgttggaaacgggttttttttcatgtaaggctagacagaagaattcccagtaacttccttgtgttgtgtgcattcaactcacagagttgaacgttccttagacagagcagatttgaaacactctatttgtgcaatttgcaagtgtaggtttcaagcgctttaaggtcaatggcagaaaaggaaatatcttcgtttcaaaactagacagaatcattcccacaaactgcgttgtgatgtgttcgttcaactcacagagtttaacctttcttttcatagagcagttaggaaacagtctgtttgtaaattctgtaagtggatattctgacatcttgtggccttcgttggaaacgggatttcttcatattctgctagacggaagaattctcagtaacttccttgtgttgtgtgtattcaactcacagacttgaatgatcctttacacagaacagtcttgaaagactctttttgtggaatttgcaagtggagatttcagccgctttgaggtcaatggtagaataggaaatatcttcctatagaaactagacagaatgattctcagaaactcctttgtgatgtgtgcgttcaactcacagagtttaacttttcttttcatagagcagttaggaaacactctgtttgtaaagtctgcaagtggatattcagacctctttgtggccttcgtttgaaacgggatttcttcatattctgctagacagaagaattcccagtaacttccttgtgttgtgtgtgttcaactcacagagttgaactttcatttacacagagcagatttgaaacactctttttgtggaatttgcaagtggagatttcaagcgctttgaggccaaaggcagaaaaggaaatatcttcgtagaaaaactagacagaatcattctcagaaactgctctgcgatgtgtgcgttcaactctcagagtttaacttttgttttcattcagcagtttggaaacactctgtttgtgaagtctgcacgtggataacttgaccacttagaggccttcgttggaaacgggtttttttcatgtaaggctagacagaagaattcccagtaacttctttgtgttgtgtgcattcaactcacagagttgaacgttcccttagagagagcagatttgaaacactctatttgtgcaatttgcaagtgtagatttcaagcgctttaaggtcaatggcagaaaaggaaatatcttcgtttcaaaactagacagaatcattcccacaaactgcgttgtgatgtgttcgttcaactcacagagtttaacctttctgttcatagagcagttaggaaacactctgtttgtaaagtctgtaattggatattctgacatcttgaggccttcgttggaaacgggatttcttcatattctgctagacagaagaattctcagtaacttccttgtgttgtgtgtattcaactcacagagttgaacgatcctttacacagagcggacttgaaacactctttttgtagaatttgcaagtggagatttcagccgcgttgaggtcaatggtagaaaaggaaatatcttcgtataaaaactagacagaatgattctcagaaactcctttgtgatgtgtgtgttcaactcacagagtttaacctttcttttcatagagcagttaggaaacactgtgtttgtaaagtctgcaagtggatattcagacctctttgaggccttcgttggaaacgggtttttttcatataaggctagacagaagaattctcagtaacttccttgtgttgtgtgttttcaactgacagagttgaactttcatttagagagagcagatttgtaacactgtttttgtggaatttgcaagtggagatttcaagcgctttggggccaaaggcagaaaaggaaatatcttcgtataaaaactagacagaatcattctcagaaactgctctgcgatgtgtgcgttcaactctcagagtttaacttttcttttcattcagcagtttggaaacactctgtttgtaaagactgcacgtggataatttcaccacttagaggtcttcgttggaaacgggtttttttcatgtaaggatagacagaagaattcccagtaacttccttgtgttgtgtacattcaactcacagagttgaacgttcccttagacagagcagatttgaaacactctttttgtgcaattggcaagtggagatttcaagcgctttatggtcaatggcagaaaaggaaatatcttcgtttcaaaactagacagaatcattcccacaaactgcgttgtgatgtgttctttcatctcacagagtttaacctttcttttcatagagcagttaggaaacactatgtttgtaaattctgtaagtggatattctgacatcttgtggccttcgttggaaacgggatttcttcatattctgctagacagaagaattctcagtaacttccttgtgttgtgtgtattcaactcacagagttgaacgatcctttacacagagcagacttgaaacactctttttgtggaatttgcaagtggagatttcatccactttgaggtcaatagtagaaaaggaaatatcttcgtagaaaaactagacagaatgattctcagaaactcctttgtgatgtgtgcgttcaactcacagagtttaacctttcttttcatagagcagttaggaaacactctgtttgtaaagtctgcaagtggatattcagacctctttgaagccttcgttggaaacgggatttcttcatattatgctagacagaataattctcagtaacttccttgtgttgtgtgtattcaactcacagagttgaactatcctttacagagagcagacttgaaacactctttttgtggaatttggaagtggagatttcagccgctttgaggtcaaaggtagaataggaaatatcttcctacagaaaatagacagaatcattctcagaaactgctctgcgatgtgtgcgttcaactctcagagtttaacttttcttttcattcagcagtgtggaaacactgtgtttgtaaagtctgcacggggatattttgaccacttacaggccttcgttggaaacgggtttttttcctgtaaggctagacagaagaattcccagtaacttccttgtgttgtgcgcattcaactcacagagttgaacgttcccttagacagagcagatttgaaagagcctatttgtgcaatttgcaagtgtacatttcaagcgctttaaggtcaacggcagaaaaggaaatatcttcctttcaaaactagacagaatgattctcagaaactcctttgtgatgtgtgcgttcaactcacagagtttaacctttcttttcatagagcagttaggaaacactctgtttgtaaagtctgcaagtagatattcagacatccttgaggctttcgttggaaacgggatttcttcatattctgctagaaagaagaattctcagtaacttctttgtgttgtgtgtattcaactcacagagttgaacgatcctttacacagagcagacttgaaacactccttttgtggaatttgcaagtggagatttcagccgctttgaggtcaatggtagaataggaaatatcttcctatagaaactagacagaatgattctcagaaactcctttgtgatgtgtgtgttcacctcacagagtttaacctttcttttcatagagcagttagtaaacactctgtttataaagtctgcaagtggatattccgacccctttgaggccttcgttggaaacgggatttcttcatattatgctagacagaagaattctcagtaacttccttgtgttgtgtgtattcaactgacagagttgaactttcatttagagagagcagattagaaacactgtttttgtggaatttgcaagtgcagatttcaagcgctttgtggccaaaggcagaaaaggaaatatcttcgtatgaaaactagccagaatcattctcagcaaactgctctgcgatgtgtgcgttcaactctcagagtttaacttttcttttcattcagcagtttggaaacactctgtttgtaaagtctgcacgtggatattttgaccacttagaggccttcgttggaaacgggtttttttcctgtaaggctagacagaagaattcccagtaacttccttgtgttgtgtacattcaactcacagagttgaacgttcccttagacagagcagatgtgaaacactctttttgtgcaattggcaagtggagatttcaagcgctttaaggtcaatggcagaaaaggaaatatctttgtttcaaaactagacagaatcattcccacaaactgcgttgtgatgtgttcgttcaactcacacagtttaacctttcttttcatagagcagttaggaaacagtctgtttgtaaattctgtaagtggatattctgacatcttgtggccttcgttggaaacgggatttcttcatattctgctagacagaagaattctcagtaacttccttgtgttgtgtgtattcaactcacagagttgaacgatcgtttacacagagcagacttgaaacactctttttgtggaatttgcaagtggagatttcagccgctttgaggtcaatggtagaaaaggaaactatcttcatataaagactagacagaatgattctcagaaactcctttgtgatgtgtgcgttcaactcacagagtttaacctttcttttcatagagcagttaggaaacactctgtttgtaaagtctgcaagtggatattcagacctctttgaggccttcgttggaaacgggtttttttcatatcaggctagacagaagaattcccagtaacttccttgtgttgtgtgtgttcaactcacagagttgaactttcatttacacagagcagatttgaaacactctttttgtggaatgtgcaagtggagatttcaagcgctttgaggccaaaggcagaaaaggaaatatcttcgtataaaaactagacagaatcattctcagaaactgctgcgtgatgtgtgcgttcaactctcagagtttaacttttcttttcattcagcggtttggaaacactctgtttgtaaagtctgcacgtagaaattttgaccacttagaggccttcgttggaaacgggtttttttcatgtaaggctagacagaagaattcccagtaacttccttgtgttgtgtgcattcaactcacagagttgaacgttcccttagacagagcagatttgaaacactctatttgtgcaatttgcaattgtagatttcaagcgctttaaggtcaacggcagaaaaggaaatatcttcgtttcaaaactagacagaatgattgtcataaactcctttgtgatgtgtgcgttcaacacacagagtttaacctttctgttcatagagcagttaggaaacattctgtttgtaaagtctgtaagtggatattctgacatcttgtggccttcgttggaaacgggatttcttcatattctgctagacagaagaattctcagtaacttccgcgtgttgtgtgtattcaactcacagagttgaacgatcctttacacagagcagacttgtaacactctttttgtggaatttgcaagtggagatttcagccgctttgaagtcaaaggtagaaaaggaaatatcttcctataaaaactagacagaatgattctcagaaactcctttgttatgtgtgcgttcaactcacagagtttaacctttcttttcatagagcagttaggaaacactctgtatgtaaagtctgcaagtggatattgagacctctttgaggccttcgttggaaacgggaattcttcatattatgctagacagaagaattcccagtaacttccttgtgttgtgtgtgttcaactcacagagttgaacattcatttacccagagcagatttgaaacactctttttgtggaatttgcaagtggagatttcaagcgctttgaggccaaaggcagaaaaggaaatatcttcgtttcaaaactagacagaatcattatcagaaactgctgcgtgatgtgtgcgttcaactctcagaatttaagttttcttttcattcagcggtttggaaacactctgtttgtaaagtctgcacgtggatatattgaccacttagaggccttcgttggaaacgggtttttttcatgtaaggctagacagaagaattcccagtaacttccttgtgttgtgtgcattcaactcacagagttgaacgttcccttagacagagcagatttgaaacactctatttgtgcaatttgcaagtgtagatttcaagcgctttaaggtcaacggcagaaaaggaaatatcttcgtttcaaaactaggcagaatcattcccacaaactgcgttgtgatgtggtcgttcaactcacagagtttaacttttcttttcatagagcagttaggaaacacctctgtttgtaaagtctgtaagtggatattctgacatcttgtggccttcgttggaaacgggatttcttcatattctgctagacagaagaattcttagaatcttccttgtgttgtgtgtattcaactcacacagttgaacgatggtttacacagagcagatttgaaacactctttttgtggaatttgcaagtggagatttcagccgctttgaggtcaatggtagaaaaggaaatatcttcgtataaaaactagacagaatgattctcagaaactcctttgtgatgtgtgcgttcaactcacagagtttaacctttcttttcatagagcagttaggaaacactctgtttgtaaactctgcaagtggatattcagacctctttgaggccttcgttggaaacgggatatcttcatactgtgctagacagaagaattcccagtaacttccttgcgttgtgtgtgttcaactcacagagttcaactttcatttacacagagcagatttgaaacactgtttttgtggaatttgcaagtggagatttcaagcgctttgaggccaaaggcagaaaaggaaatatcttcgtttcaaaaccagacagaatgattctcagaaactcctttgtgatgtgtgcgttcaactcacagagtttaacctttcttttcatagagcacttaggaaacactctgtttgtaaagtctgcaagtggatattcagacctctttgaggccttcgttggaaacgggtttttttcatataaggctagacagaagaattcccagtaacttccttgtgttgtgtacattcaactcacagagttgaaagttcccttagacagagcagatttgaaacactctttttgtgcaattggcaagtggagattacaagcactttaaggtcaatggcagaaaaggaaatatcttcgtttcaaaactagacagaatcattcccacaaactgcgttgtgatgtgttcgttcaactcacagtagtttaacctttccgttcatagagcagttaggaaacacactgtttgtaaagtctgtaagtggatattctgacatcttgtggccttcgttggaaacgggatttcttcatattctgctagacagaagaattctcagtaacttccgcgtgttgtgtgtattcaactcacagagttgaacgatcctttacacagagcagacttgaaacactctttttgtggaatttgcaagtggagatttcagcctctttgaagtcaatggtagaaaaggaaatatcttcctataaaaactagacagaatgattctcagaaactcctttgtgatgtgtgcgttcaactcacagagttcaacttttcttttcatagagcagttaggaaacactctgtttgtaaagtctgcaagtggatattcagacctctttgaggccttcgttggaaacgggatttcttcatattctgctagacagaagaattcctagtaacttccttgttttgtgtgtgttcaactcacagagttgaactttgatttacacagagcagatttgaatcactctttttgtggaatttgcaagtggagatttcaagcgctttgaggccaaaggcagaaaaggaaatatcttcgtataaaaactagacagagtaatcattctcagaaactgctgcgtgatgtgtgcgttcaactctcacagtttaacttttcttttcattcagcggtttggaaacactctgtttgtaaagtctgcacgtggatattttgaccacttagaggccttcgttagaaactggtttttttcatgtaaggctagacagaagaattcccagtaacttcccttgtgttgtgtgcattcaactcacagagttgaacgttcccttagacagagcagatttgaaacactctatttgtgcaatttgcaagtgtagatttcaagcgctttaaggtcaacggcagaaaaggaaatatcttcgtttcaaaactagacagaatcattcccacaaactgcgttgtgatgtgttcgttcaactcacagagtttaacctttctgttcatatagcagttaggaaacactctcaaaagtctgtaagtggatattctgacatcttgtggccttcgttggaaacgggatttcttcatattctgctagacagaagaattctcagtaacttccttgtgttgggtgtattcaactcacagagttgaaggatcctttacagagagcaggcttgaaacactctttttgtcgaatttgcaagtggagatttcagccgctttgaggtcaatggtagaataggaaatatcttcttatagaaactagacagaatgattctcagaaactcctttgtgatgtgtgcgttcaactcacagagtttaacctttcttttcatagagcagttaggaaacactctgtttgtaaagtctgcaagtggatattcagacctccttgaggccttcgttggaaacaggtttttttcatataaggctagacagaagaattctcagtaacttccttgtgttgtgtgtattcaactgacagagttgaactttcatttagagagagcagatttgaaacactgtttttgtggaatttgcaagtggagatttcaagcgctttagggccaaaggcagaaaaggaaatatcttcgtataaaaactagacagaaatgattctcagaaactcctttgtgatgtgtgagttcaactcacagagtttatcctttcttttcatagagcagttaggaaacactctgtttgtaaagtctgcaagtggatattcagacctctttgaggccttcgttggaaacgggatttcttcatattctgctagacagaagaattcccagtaacttccttgtgttgtgtgcattcaactcacagagttgaacattcccttgacagagcagatttgaaacactctatttgtgcaatttgcaagtgtagatttcaagcgctttaaggtcaatggcagaaaagggaatatcttcgtttcaaaactagacagaatgattctgagaaactcctttgtgatgtgtgcgttcaactgacagagtttaacctttcttttcatagagcagttaggaaacactctgtttgtaaagtctgcaagtggatattcagacatccttgaggctttcgttggaaacgggatttcttcatattctgctagaaagaagaattctcagtaacttccttgtgttgtgtgtattcaactcacagagttgaatgatcctttacacagaacagtcttgaaacactctttttgtggaatttgcaagtggagatttcagccgctttgaggtcaatggtagaataggaaatatcttcatatagaaactagacagaatgattctcagtaactcctttgtgatgtgtgcgttcaactcacagagtttaacctttcttttcatagagcagttaggaaacactctgtttgtaaagtctccaagtggatattcagacctctttgaggccttcgttggaaacgggtttttttcatataaggctagacagaagaattcccagtaacttccttgtgttgtgtgtgttcagctcacagagttgaactttcatttacacagagcagatttgaaacactctttttgtggaatttgcaggtggagatttcaagcgctttgaggccaaaggcagaaaaggaaatatcttcgtataaaaactagacagaagcattctcagaaactgctctgcgatgtgtgcgttcaactctcagagtttaacttttcttttcattcagcagtttggaaacactctgtttgtaaagtctgcacgtggataacttgaccacttagaggccttcgttggaaacgggtttttttcatgtaaggctagacagaagaattcccagtaacttccttgtgttgtgtacattccactcacagagttgaacgttcccttagacagagcagatgtgaaacactctttttgtgcaattggcaagtggagatttcaagcgctttaaggtcaaaggcagaaaaggaaatatcttcgtttcaaaactagacagaatcattcccacaaactgcgttgtgatgtgttcgttcaactcacagggattaacctttcttttcatagagcagttaggaaacagtctgtttgtcaattctgtaagtggatattctgacatcttgtggccttcgttggaaacgggatttcttcatattctgctagacagaagagttctcagaaacttccttgtgttgtgtgtattcaactcacagagttgaactatcgtttacacagaacagacttgagacactctttttgtggaatttgtaagtggagatttcagccgctttgaggtcaatggtagaaaaggaaatatcttcatataaaaactagacagaatgattctcagaaactcctttgtgatgtgtgcgttcaactcacagagtttaacctttcttttcatagagcagttaggaaacactctgtttgtaaagtctgcaagtggatattcagacatctttgaggctttcgttggaaacaggatttcttcatattctgctagacagaagaattccagtaacttccttgtgttgtgtgtgttcaactcacagatttgaactttcatttacacagagcagatttgaaacactctttttgtggaatttgcaaatggagatttcaagcgctttgaggccaaaggcagaaaaggaaatatcttcgtataaaaactagacagaatcattctcagaaactgctctgcgatgtgtgcgttcaactctcagagtttaactttgcttttcattcagcagtttggaaacactctgtttgtaaagtctacacgtggatattttgaccacttagaggccttcgttggaaacgggtttctttcctataaggctagacagaagagttctcagtaacttccttgtgttgtgtgtattcaactcacacagttgaacgatcctttatagagagcagacttgtaacactctttttgtggaatttgcaagtggagatttcagccgctttgaagtcaaagtagaaaaggaaatatcttcctataaaaactagacagaatcattcccacaaactgcgttgtgatgtgttcgttcatctcacagagtttaacctttcttttcatagagcagttaggaaacactctgtttgtaaattctgtaagtggatattctgacatcatgtggccttcgttggaaacgggatttcttcatattctgctagacagaagaattctcagtaacttccttgtgttgtgtgtattcaacccacagagttgaacgatcctttacacagagcagacttgaaacactctttttgtggaatttgcaagtggagatttcagccgctttgaggtcaatggtagaaaaggaaatatcttcgtataaagactagacagaatgattctcagaaactcctttgtgatgtgtgcgttcaactcacagagtttaacctttcttttcatagagcagttaggaaacactctgtgtgtaaagtctgcaagtggatattcagacctccttgaggccttcgttggaaacgagatttcttcataatatgctagacagaagaattctcagtaacttccttgtgttgtgtgtattcaactcacagagttgaaccatcctttacagagagcagacttgaaacactctttttgtggaatttgcaagtggagatttcagccgctttgaggtcaatggtagaataggaaatatcttcctatagaaactagacagaatgattctcagaaactcctttgtgatgtgtgcattcaactcacagagtttaacttttcttttcatagagccgttaggaaacactctgtttgtaaagtctgcaagtggatattcagacctctttgaggccttcgttggaaacgggatttcttcatattatgctagacagaagaattcccggtaacttccttgtgttgtgtgtgttcaactcacagagttgaactttgatttacacagagcagatttgaaacactctttttgtggaatttgcaagtggagatttcaagcgctttgaggccaaaggcagaaaaggaaatatcttcgtataaaaactagacagaatcattctcagaaactgctctgcgatgtgtgcgttcaactctcagagtttaacttttcttttcattcagcagtttggaaacactctgtttgtaaagtctgcacgtggatattttgaccacttagaggccttcgttggaaacgggtttttttcctgtaaggctagacagaagaattcccagtaacttccttgtgttgtgtgcattcaactcacagagttgaacgttcccttagacagagcagatttgaaacactctatttgtgcaatttgcaagtgtagttttcaagctctttaaggtcaacgacagaaaaggaaatatcttggtttcaaaactagacagaatcattcccacaaactgcgttgtgatgtgttcgttcaactcacagagtttaacctttctgttcatagagcagttaggaaacactctgtttgtaaagtctgtaagtggatattctgacatcttgtggccttcgttggaaacgggatttcttcctattctgctagacagaagaattctcagtaacttccttgtgttgtgtgtattcaactaacagagttgaacgatcctttacacagagcagacttgaaacactctttttgtggaatttgcaagtggagatttcagccgctttgaggtcaatggtagaaaaggaaactatcttcatataaagactagacagaatgattctcagaaactcctttgagatgtgtgtgttcaactcacagagtttaacctttcttttcatagagcagttaggaatcactctgtttgtaaagtctgcaagtggatattcagacctctttgaggccatcgctggaaacgggtttttttcatataaggctagacagaagaattcccaataacttccttgtgttgtgtgtgttcaactcacagagttgaactttcatttacacagagcagatttgaaacactctttttgtggaatttgcaagtggagatttcaagcgctttgaggccaaaggcagaaaaggaaataccttcgtataaaaactagacagaatgattctcagaaactcctttgtgatgtgtgcgttcaactcacagagtttaacctttcttttcattcggcggtttggaaacactctgtttgtaaagtctgcacgtggatattcagacctctttgaggccttcgttggaaacgggtttttttcatgtaaggctagacagaagaattcccagtaacttccttgtgttgtgtgcattcaactcacagagttgaacgttcccttagacagagcagatttgaaacactctatttgtgcaatttgcaaatgtagatttcaagcgctttaaggtcaacggcagaaaaggaaatatcttcgtttcaaaactagacagaatcattcccacaaactgcgttgtgatgtgttcgttcaactcacagagtttaacctttcttttcatagagcagttaggaaacagtctgtttgtcaattctgtaagtggatattctgacatcttgtggccttcgttggaaacgggatttcttcatattctcctagacagaagaattctcagtaacttccttgtgttgtgtgtattcaactcacagagttgaacgatcctttacacagagcagacttgaaacactcgttttgtggaatttgcaagtggagatttcagccgctttgaagtcaatggtagaaaaggaaatatcttcgtataaaaactagacagaaagattctcataaactcctttgtgatgtgtgcgttcaactcacagagtttaacctttcttttcatagagcagttaggaaacactctgtttgtaaagtctgcaagtggatattcagacctctttgaggccttcgttggaaacgggatttcttcatattatgctagacgggaagaattctcagtaacttccttgtgttgtgtgtattcaactgacagagttgaactttcatttagagagagcagatttgaaacactgtttttgtggaatttgcaagtggagatttcaagcgctttggggccaaaggcagtaaaggaaatatcttcgtataaaaactagacagaatcattctcagaaactgctctgcgatgtgtgcgttcaactctcagagtttaacttttcttttcattcagcagtttggaaacactctgtttgtaaagtctgcacgtggatattttgaccacttagaggccttcgttggaaacgtgtttttttcctgtaaggctagacagaagaattcccagtaacttccttgtgttgtgtacattcaactcacagagttgaacgttcccttagacagagcagatttgaaacactctttttgtgcaattggcaagtggaaatttcaagcgctttgaggtcaatggcagaaaaggaaatatcttcgtttcaaaactagacagaaatcattcccacaaactgcgttgtgatgtgttcgttcaactcacagaagtttaacctttcttttcatagagcagttaggaaacactctgttggtaaaatctgtaagtggatattctgacatcttgtggccttcgttggaaacgggatttcttcatattctgctagacagaagaattctcagtaacttccttgtgttgtgtgtattgaactcgcagagttgaacgatcctttacacagagcagacttgaaacactctttttgtggaatttgcaagtggagatttcagccgctttgaggtcaatagtagaaaaggtaatatcttcgtagaaaaactagacagaatgattctcagaaactcctttgtgatgtgtgcgttcaactcacagagtttgacctttcttttcacagagcagttaggaaacactctgtttgtaaagtctgcaagtggatattcagacctctttgaggccatagttggaaacgggatttcttcatattctgctagacagaagaattctcagtaacttccttgtgttgtgtgtattcaactgacagagttgaactttcatttagagagagcagatttgaaacactgtttttgtggaatttgcaagtggagatttcaagcactttggggccaaaggcagaaaaggaaatatcttcgtataaaaactagacagaatcattctcagaaactgctctgcgatgtgtgcgttcaactctcagagtttaacttttcttttcattcagcagtttgcaaacactctgtttgtaaagtctgcacgtggatattttgaccacttagaggccttcgttggaaacgggtttttttcctgtaaggctagacagtagaattcccagtaacttccttgcgttgtgtacattcaactcacagagttgaacgttcccttagacagagcagatttgaaacactctttttgtgcaattggcaagtggagatttcaagcgctttaaggtcaatggcagaaaaggaaatatcttcgtttcaaaactagacagaatcattcccacaaactgcgttgtgatgtgttcgttcaactcacagtagtttaacctttctgttcatagagctgttaggaaacactctgtttgtaaagtctgtaagtggatattctgacatcttgtggccttcgttggaaacgggatttcttcatattctgctagacagaagaattctcagtaacttccttgtgttgtgtgtattcaactcacagagttgaacgatcctttacacagagcatacttgaaacactctttttgtggaatttgcaagtggagatttcagccgctttgatgtcaatggtagaaaaggaaataacttcgtataaagactagacagaatgattctcagaaactcctttgtgatgtgtgcgttcaactcacagagtttaacctttcttttcatagagcagttaggaaacactgtgtttgtaaagtctgcaagtggatattcagacctctttgaggccttcgttggaaacgggtttttttcatataaggctagacagaagaattctcagtaacttgcttttgttgtgtgtattcaactgacagagttgaactttcatttagacagagcagatttgaaactctctttttctggaatttgcaagtggagatttcaagcgctttgaggccaaaggcagaaaaggatatatcttcgtataaaaactagacagaatcattctcagaaactgctctgcgatgtgtgccttcaactctcagagtttaacttttcttttcattcagcagtttggaaacactctgtttgtaaagtctgcacgtggataatttgaccacttagaggccttcgttggaaacgggtttttttcatgtaaggctagacagaagaattcccaataacttccttgtgttgtgtgcattcaactcacagagttgaacgttcccttagacagagcagatttgaaacactctatttgtgcaatttgcaagtgtagatttcaagcgctttaaggtcaatggcagaaaaggaaatatcttcgtttcaaaactagacagaatgattctcagaaactcctctgtgatgtgtgcgttcaactcacagagtttaacttttcttttcatagagcagttaggaaacactctatttgtaaagtctgcaaggggatattcagacctctttgaggccttcgttggaaacgggatttcttcatattctgctagacagaagaattctcagtaacttccttgtgttgtgtgtattcaactcacagagttgaacgatcctttacacagagcagacttgaaacactctttttgtggaatttgcaagtggagatttcagccgctttgaggtcaatggtagaaaaggaaatatcttcgtatagaaacaagacagaatgattctcagaaactcctttgagatgtgtgcgctcaactcacagagtttaacctttcttttcatagagcagttaggaaacactctgtttgtaaagtctgcaagtggatattcagacctctttgaggccttcgttggaaacgggtttttttcaaataaggctagacagaagaattctcagtaacttccctgtgttgtgtgtattcaactgacagagtcgaactttcatttagagagagcagatttgtaacattgtttttgtggaatttgcaagtggagatttcaagcgctttggggccaaaggcagaaaatgaaatatcttcgtataaaaactagacagaatcattctcagaaactgctctgcgatgtgtgcgttcaactctcagagtttaacttttcttttcattcagcagtttggaaacactctgtttgtaaagtctgcacgtggatattttgaccacttagaggccttcgttggaaacgggtttttttgcctgtaaggctagacagaaagaattcccagtaacttccttgtgttgtgtacattcaactcacggagttgaacgttcccttagacagagcagatttgaaacactctttttgtgcaattggcaaatggagatttcaagcgctttaaggtcaatggcagaaaaggaaatatcttcgtttcaaaactagacagaatgattctcagaaactcctttgtgatgtgtgcgttcaactcacagagtttaacctttcttttcatagagcagttgggaaacactctgtttgtaaagtctgcaagtggatattcagacatccttgaggctttcgttggaaaagggatttcttcatattctgctagacagaagaattctcagtaacttccttgtgttgtgtgtattcaactcacacagttgaacgatcctttacacagagcagacttgaaacactctttttgtggaatttgcaagtggagatttcagccgctttgaggtcaatggtagaataggaaatatcttcctatagaaactagacagaaagattctcagaaactcctttgtgatgtgtgcgttcaactcacagagtttaacctttcttttcatagagcagttaggaaacactctgtttgtaaagtctgcaagtggatattcagacctctttgaggccttcgttggaaacgggtttttttcatataaggctagacagaagaattctcagtaacttccttgtgttgtgtgtattcaactgacagagttgaactttcatttagagagagcagatttgaaacactgtttttgtggaatttgcaagtggagatttcaagcgctttgggaccaaaggcagaaaaggaaatatcttcgtatataaactagacagaatcattctcagaaactgttctgcgatgtgtgcgttcaactctcagagtttaacttttcttttcattcagcagtttggaaacactctgtttgtaaagtctgcacgtggatattttgaccacttagaggccttcgttggaaacgggtttttttcctgtaaggctagacagaagaattcccagtaacttccttgtgttgtgtacattcaactcacagagttgaacgttcccttagacagagcagatttgaaacactctttttgtgcaattggcaagtggtgatttcagccgctttgaggtcaatggtagaaaaggaaatatcttcgtataaaaactagacagaatcattcccacaaactgcgttgtgatgtgttcgttcaactcacagagtttaacctttcttttcctagagcagttaggaaacagtctgtttgtaaattctgtaagtggatattctgacatcttgtggccttcgttggaaacgggatttcttcatattctgctagacagaagaattctcagtaactttccttgtgttgtgtgtattcaactcacagatttgaacgatcctttacacagagcagacttgtaacactctttttgtggaattcgcaagtggagatttcagcagctttgaagtcaaaggtagaaaaggaaatatcttcctataaaaactagacagaatgattctcagaaactcctttgtgatgtgtgtgttcaactcacagagtttaacttttcttttcctagagcagttagtaaacactctgtttaaaaagtctgcaagtggatattcagacccctttgaggccttcgttggaaacgggatttcttcatattatggtagacagaagaattctcagtaacttccttgtgttgtgtgtattcaactcacagagttgaacgatccttttcacagagcagacttgaaacactctttttgtggaatttgcaagtggagatttcagccgctttgaggtcaatggtagaaaagggaatatcttcgtatagaaactagacagaatcattctcagaaactgctctgcgatgtgtacgttgaactctcagagtttaacttttcttttcattcagcagtttggaaacactctgtttgtaatgtctgcacgtggataatttgaccacttagaggccttcgttggaaacgggtttttttcatgtaaggctagacagaagaattctcagaaacttccttgtgttgtgtgtactcaactcacagagttgaacgatcctttacacagagcagacttgaaacactctttttgtggaatttgcaagtgtagatttcaagcgctttaaggtcaatggcagaaaaggaaatatcttcgtttcaaaactagacagaatcattcccacaaactgcgttgtgatgtgttcgttcaactcacagaatttaacctttctgttcatagagcagttaggaaacactctgtttgtaaagtctgtaagtggatattctgacgtcttgtggccttcgttggaaacgggatttcttcatattctgctggacagaagaattctcagtaacttccttgtgttgtgtgtattcaactcacagagttgaacgatcctttacagagagcagacttgaaacactctttttgtggaatttgcaagtggagatttcagcctctttgaggtcaatggtagaataggaaatatcttcctatagaaaccagacagaatgattctcagaaactcctttgtgatgtgtgcgttcaactcacagagtttaacctttcttttcatagggcagttaggaaacactctgtttgtaaagtctgcaagtggatattcagacatccttgaggctttcgttggaaacgggatttcttcatattctgctagaaagaagaattcccagtaacttccttgtgttgtctgtgttcaactcacagagttgaactttcatttacacagagcagatttgaaacactctttttgtggaatttgcaaatggagatttcaagcgctttgaggccaaaggcagaaaaggaaatatctttgtataaaaactagacagaatcattctcagaaactgctctgtgatgtgtgcgttcaactctcagagtttaacttttcttttcattcagcagtttggaaacactctgtttgtaaagtctgcacgtggataatttgaccacttagaggccttcgttggaaacgggtttttttcatgtaaggctagacagaagaattctcagtaacttcccttgtgttgtgtgtattcaactcacagagttgaacgatcctttacacagagcagacttgtaacactctttttgtggaatttgcaagtggagatttcagccgctttgaagtcaaaggtagaaaaggaaatatcttcctattaaaactagacagaatgattctcagaaaatcatttgtgatgtgtgcgttcaactcacagagtttaacttttcttctcatagagcagttaggaaacactctgtttgtaaagtctgcaagtggatattcagacctctttgaggccttcgttggaaacgggatttcttcatattctgctagacagaataattcccagtaacttccttgtgttgtgtgtattcaactcacagagttgaatgatcctttacacagagcagacttgaaacactctttttgtggaatttgcaagtggagatttcagccgctttgaggtcaatggtagaaaagtaaatatcttcgtataaagactagacagaatgattctcagaaactcctttgtgatgtgtgcgttcaactcacagagtttaacatttcttgtcatagagcagttaggaaacactctgtttgtaaagtctgcaagtggatattcagacctccttgaggccttcgttggaaacgagatttcttcatattatgctagacagaagaattctcagtaacttcccttgtgttgtgtgtattcaactgacagatttgaactttcatttagagagagcagatttgaaacactgtttttgtggaatttgcaagtggagatttcaagcgctttggggccaaaggcagaaaaggaaatatcttcgtataaaaactagacagaatcattctcagaaactgctgcgtgatgtgtgcgttcaactctcagagtttaacttttcttttcattcagcggtttggaaacactctgttcgtaaagtctgcacgtggatattttgaccacttaggggccttcgttggaaacgggtttttttcatgttaggctagacagaagaattcccagtaacttccttgtgttgtgtacattcaactcacagagttgaacgttcccttagacagagcagatttgaaacactctttttgtgcaattggcaaatggtgatttcaagcgctttaaggtcaatggcagaaaaggaaatatcttcgtttcaaaactagacagaatcattcccacaaactgcgttgtgatgtgttcgttcaactcacagagtttaacctttctgttcatagagcagttaggaaacactctgtttgtaaagtccgtaagtggatattctgacatcttgtggccatctttggaaacgggatttcttcatagtctgctagacagaagagttctcagtaacttccttgtgttgtgtgtattcaactcacacagttgaacgatcctttacagagagcagacttgtaacactctttttgtggaatttgcaagtggagatttcagccgctttgaagtcaaagtagaaaaggaaatatcttcctataaaaacaagacagaatgattctcagaaactcctttgtgatgtgtgagttcaactcacagagtttaacctttcttttcatagagcagttaggaaacactctgtttgtaaagtctgcaagtggatattcagacctctttgaggccttcgttggaaacgggtttttttcatataaggctagacagaagaattcccagtaacttccttgtgttgtgtgtgttcaactcacaaagttgaactttcatttacacagagcagatttgaaacactctttttgtggaatttgcaaatggagatttcaagcgctttgaggccaaaggcagaaaaggaaatatcttcgtataaaaactagacagaatcattctcagaaactgctctgcgatgtgtgcgttcaactctcagagtttaacttttcttttcattcagcagtttggaaacactctgtttgtaaagtctgcacgtggataatttgaccacttggaggccttcgttggaaacggatttttttcatgtaaggctagacagaagaattcccagtaacttccttgtgttgtgtgtgttcaactcacagagttgaactttcatttacacagagcagatttgaaacactctttttgtggaatttgcaagtggagatttcaagcgctttaaggtcaatggcagaaaaggaaatatcttcgtttcaaaactagacagaatcattcccacaaactgcgttgtgatgtgttcgttcaactaacagagtttaacctttctgttcatagagcagttaggaaacactctgtttgtaaagtctgtaagtggatattctgacatcttgtggccttcgttggaaacgggatttcttcatattctgctagacagaagaattctcagaaacttccttgtgttgtgtgtattcaactcacagagttgaacgatcgtttacacagagcagacttgagacactctttttgtagaatttgtaagtggagatttcagccgctttgaggtcaatggtagaaaaggaaatatcttcatataaaaactagacagaatgattctcagaaactcctttgtgatgtgtgtgttcaactcacagagtttaacctttcttttcatagagcagttagtaaacactctgtttataaagtctgcaagtggatattcagaccccttggaggccttcgttggaaacgggatttcttcatattatgctacacagaagaattcccggtaacttctttgtgttgtgtgtgttcaactcacacagttgaactttcatttacacagagcagatttgaaacactctttttgtggaatttgcaagtggagatttcaagcgctttgaggccaaaggcagaaaaggaaatatcttcgtttcaaaactagacagaatcattctcagaaactgctgcgtgatgtgtgcgttcaactctcagagtttaacttttcttttcattcagcggtttggaaacactctgtttgtaaagtctgtgcgtggatattttgaccacttagaggccttcgttggaaacgggtttttttcatgtaaggctagacagaagaattcccactaacttccttgtgttgtgtgcattcaactcacagacttgaacgttcccttagacagagcagatttgaaacactctatttgtgcaatttgcaagtgtagatttcaagcgctttaaggtcaatggcagaaaaggaaatatcttcgtttcaaaactagacagaatgattctcagaaacttctttgtgatgtgtgcgttcaactcacagagtttaacctttcttttcatagagcagttaggaaacactctgtttgtaaactctgcaagtggatgttcagacctgtttgaggccttcgttggaaacgggatttcttcatactattctagacagaagaattctcagtaacttccttgtgttgtgtgtattcaactcatagagttgaacgatcctttacacagagcagacttgtgacactctttttgtggaatttgcaagtggagatttcacccgctttgacgtcaaaggtagaaaaggaaatatcttcctataaaaactagacagaatgattctcagaaacttctttgtgatgtgtgcgttcaactcacagagtttaacctttcttttcatagagcagttaggaaacactctgtttgtaaactctgcaagtggatattcagacctctttgaggccttagttggaaacgggatttcttcatactgtgctagacagaagaattctcagtaacttccgagtgttgtgtgtattcaactcacagagctgaacgatcctttacacagagcagacttgaaacactctttttgtggaatttgcaagtggagatttcagccgctttgaggtcaatggtagaaaaggaaatatcttcgtataaaaactagacagaagcattctcaaaaactgctctgtgatgtgtgcgttcaactctcagagtttaattttcttttcattcagcagtttgtaaacactctgtttgtaaagtctgcacgtggatattttgaccacttagaggccttcgttggaaacgagtttttttcatgtaaggctagacagaagaattcccagtaacttccttgtgttgtgtgtattcaactcacagagttgaacgttcccttagacagagcagatttgaaacactctatttgtgcaatttgcaagtgtagatttcaagcgctttaagttcaatggcagaaaaggaaatatcttcgtttcaaaactagacagaatcattctcagaaactgctgtgcgatgtgtgtgttcaactctcagagtttaactttgcttttcattcagcagtttggaaacactctgtttgtaaagtctgcacgtggataatttgaccacttagaggccttcgttggaaacgggtttttttcatgtaaggctggacagaagaattctcagtaacttccttgtgtggtgtgtattcaactcacagagttgaacgatcctttacacagagcagacttgtaacactctttttgtggaatttgcaagtggagatttcagccgctttgaagtcaaaggtagaaaaggaaatatcttcctataaaaactacacagaatgattctcagaaaatcttttgtgatgtgtgcgttcaactcacagagtttaacttttcttctcatagagcagttaggaaacactctgtttgtaaagtctgcaagtggatattcagaccactttgaggccttcgttggaaacgggatttcttcatattatgctagacagaagaattcccagtaacttccttgtgttgtgtgtgttcaactcatagagttgaactttgatttacacagagcagatttgaaacactctttttgtggaatttgcaagtggagatttcaagcgctttgaggccaaaggcagaaaaggaaatatcttcgtataaaaactagacagaatcattctcagaaactgctctgcaatgtgtgcgttcaactctcagagtttaacttttcttttcattcagcagtttggaaacactctgtttgtaaagtctgcacgtggatattttgaccacttagaggccttcgttggaaacgggtttttttcctgtaaggctagacagaagaattcccagtaacttccttgtgttgtgtacattcaactcacagagttgaacgttcccttagacagagcagatttgaaacactctttttgtgcaattggcaaatggagatttcaagcgctttaagttcaatggcagaaaaggaaatatcttcgtttcaaaactagacagaatcattcccacaaactgcgttgtgatgtgttcgttcaactcacagagtttaacctttcttttcatagagcagttaggaaacagtctgtcaattctgtaagtggatattctgacatcttgtggcattcgttggaaacgggatttcttcatattctgctagacagaagaattctcagaatcttccttgtgttgtgtgtattcaactcacagagttgaacgatcctttacacagagcagacttgaaacactctttttgtggaatttgcaagtggagatttcagctgctttgaggtccatggtagaaaaggaaatatcttcgtataaaaactagacagaatgattctcagaaactcctttgtgatgtgtgtgttcaactcacagagtttaaactttctgttcatagagcagttaggaaacactctgtttgtaaagtctgcaagtggatattcagacctccttgaggccttcgttggaaacgggatttcttcatattctgctagacagaagaattctcagtaacttccttgtgttgtgtgtattcaactgacagagttgaactttcatttacacagagcagatttgaaacactctttttgtggaatttgcaaatggagatttcaagcgatttgaggccaaaggcagaaaaggaaatatcttcgtataaaaactagacagaatcattctcagaaactgctgcgtgatgtgtgcgttcaactctcagagtttaacttttcttttcattcagcggtttggaaacactctgtttgtaaaaactgcacgtggatattttgaccacttagaggccttcgttggaaacgggtttttttcatgtaaggctagacagaagaattcccagtaacttccttgtgttgtgtgcattcaactcacagagttgaacgttcccttagacagagcagatttgaaacactctatttgtgcaatttgcaagtgtagttttcaagctctttaaggtcaacggcagaaaaggaaatatcttcgtttcaaaactagacagaatgattctcataaactcctttgtgatgtgtgcgttcaactcacagagtttaacctttcttttcatagagcagttaggaaacactctgtttgtaaagcctgcaagtggatattcagacctccttgaggccttctttggaaacgggatttcttcatattctgatagacagaagaattctcagtaacttccttgtgttgtgtgtattcaactcacagagttgaacgatcctttacccagagcagacttgaaacaccctttttgtggaatttgcaagtggagatttcagccgctttgaggtcaatggtagaaaaggaaatatcttcgtataaagactagacagaatgattctcagaaactcctttgtgatgtgtgtgttcaactcacagagtttaacctttcttttcatagagcagttcgtaaacactctgtttataaagtctgcaagtggatattcagacccctttgaggccttctttggaaacgggatttcttcatattatgctagacggaagaattccccgtaacttccttgtgttgtgtgtgttcaactcacagagttgaactttcatttacatagagcagatttgaaacactctttttatggaatttgcaagtggagatttcaagcgctttgaggccaaaggcagaaaaggaaatatcttcgtataaaaactagacagaatcattctcagaaactgctctgcgatgtgtgcgttcaactctcagagtttaacttttcttttcattcagcagtttggaaacactctgtttgtaaagtctgcacgtggataatttgaccacttagaggccttctttggaaacgggtttttttcatataaggctagacagaagaattcccagtaacttccttgtgttgtgtacattcaactcacagatttgaacgctcccttagacagagcagatttgaaacactctttttgtgcaattggcaattggagatttcaagcgctttaaggtcaatggcagaaaaggaaatatcttcgtttcaaaactagacagaatgattctcagaaacttctttgtgatgtgtgcgttcaactcacagagtttaacctttcttttcatagagcagttaggaaacactctgtttgtaaactctgcaagtggatatttagacctctttgaggccttcgttggaaacgggattttttcatactgtactagacagaagaattctcagtaacttccttgtgttgtgtgtattcaactcacagagttgaaagatcctttacacagagcagacttgaaacactctttttgtggaatttgcaagtggagatttcaaccgctttgaggtcaatagtacaaaaggaaatatcttcgtagaaaaactagacagaatgattctcagaaactcctttgtgatgtgtgcgttcaactcacagagttcaacctttcttttcatagagcagttgggaaacactctgtttgtaaagtctgcaagtggatattcagacctccttgaggccttcgttggaagcgggatttcttcatcttctgctagacagaagaattctcagtaacttccttgtgttttgtgtattcaactgacagagttgaactttcatttagagagagcagatttgaaacactgtttttgtggaatttgcaagtggagatttcaagcgctttggggccaaaggcagaaaaggaaatatcttcgtataaaaactagacagaatgattctcagaaacttctttgtgatttatgcgttcaactcacagagttaaaactttcttttcatagagcagttaggaaacactctgtttgtaaagactgcacgtggatattcagacctctttgaggccttcgttggaaacgggtttttttcctgtaaggctagacagaagaattcccagtaacttccttgtgttgtgtgcattcaactcacagagttgaacgttcccttagacagagcagatttgaaacactctatttgtgcaacttacaagtgtagttttcaagctctttaaggtcaacggcagaaaaggaaatatcttcgtttcaaaactagacagaatcattaccacaaactgcgttgtgatgtgttcgttcaacccacagagtttaagctttctcttcatagagcagttaggaaacactctgtttgtgaagtctgtaagtggatattctgacatcttgtggccttcgttggaaacgggatttcttcatattctgctagacagaagaattctcagtaacttccttgtgttgtgtgtattcaactcacagagttgaacgatcctttacacagagcagagttgaaacattctttttgtggaatttgcaagtggagatttcagccgctttgaggtcaatggtagaatagcaaatatcttcctatagaaactagacagaatgattcttagaaactcctttgtgatgtgtgtgttcaactcacagagtttaacctttcttttcatagagcagttagtaaacactctgtttataaagtctgcaagtggatattcagacccctttgaggccttcgttggaaacgggatttcttcatattatgctagacagaagaattctcagtaacttccttgtgttgtgtgtattcaactcacagagttgaacgatcctttacacagagcagacttgaaacactctttttgtggaatttgcaagtggagatatcaagcgctttggggccaaaactagacagaatcatgctcagaaactgctctgcgatgtgtgcgttcaactctcagagtttaacttttcttttcattcagcagtttggaaacactctgtttgtaaagtctgcacttgcataatttgaccgcttagaggccttcgttggaaacgggtttttttcatgtaaggctagacagaagaattcccagtaacttccttgtgttgtgtgcattcaactcacagagttgaacgttcccttagacagagcagatttgaaacactctatttgtgcaatttgcaattgtagttttcaagctctttaaggtcaacggcagaaaaggaaatatcttcgtttcaaaactagacagaatcattcccacaaactgcgttgtgatgtgttcgttcaactcacagagtttaacctttctgttcatagagcagttaggaaacactctttttgtaaagtctgtaagtggatattctgacatcttgtggccttcgttagaaacgggattttttcatattctgctagacagaagaattctcagtaacttccttgtgttgtgtgtattcaactcacagagttgaacgatcctttacacagagcagacttgtaacactctttttgtgtaatttgcaagtggagatttcagccgctttgaagtcacaggtagaaaaggaaatatcttcctataaaaactagacagaatgattctcagaaactcctttgtgatgtgtgcgttcagctcacagagtttaacctttcttttcatagagcagttcggaaacactctgtttgtaaagtctgcaagtggatattcagacctctttgaggccttcgttggaaacgggatttcttcatattctgctagacagaagattcccagtaacttccttgtgttgtgtgtgttcaactcacagagttgaactttgatttacacagagcagatttgaaacactctttttgtggaatttgcaagtggagatttcaagcgctttgaggccaaaggcagaaaaggaaatatcttcgtataaaaactagacagaatcattctcagaaactgctctgcgatgtgtgcgttcaactctcagagtttaacttttcttttcattcagcagtttggaaacactctgtttgtaaagtctgcaggtggatactttgaccacttagagaccttcgttggaaacgggtttttttcctgtaaggctagacagaagaattcccagtaacttccttgtgttgtgtgcattcaactcacagagatgaacgttcccttagacagagcagatttgaaacactctatttgtgcaatttgcaagtgtagatttcaagcgctttaaggtcaatggcagaaaaggaaatatcttcgtttcaaaactagacagtatcattcccacaaactgcgttgtgatgtgttcgttcaactcacagagtttaacctttcttttcatagagcagttaggaaacagtctgtttgtaaattctgtaagtggatattctgacatcttgtggccttcgttggaaacgcgatttcttcatattctgctagacagaagaattctcagaatcttccttgtgttgtgtgtattcaactcaaagagttgaacgatcctttacacagagcagacttgaaactctctttttgtggaatttgcaagtggagatttcagccgctttgaggtccatggtagaaaaggaaatatcttcgtataaaaactagacagaatgattctgagaaactcctttgtgatgtgtgcgttcaactcacagagtttaacctttcttttcatagagcagttaggaaacactctgtttttaaagtctgcaagtggatattcagacctccttgaggccttcgttggaaacgggatttcttcatattatgctagacagaagaattccagtaacttccttgtgttttgtgtgttgaactcacagagttgaactttcatttacacagagcagatttgaaacactctttttgtggaatttgcaagtggagatttcaagggctttgaggccaaaggcagaaaaggaaatatcttcgtttcaaaactagacagaatcattctcagaaactgctgcgtgatgtgtgcgttcaactctcagagtttaagttttcttttcattcagcggtttggaaacactctgtttgtaaagtctgcacgtggaaattttgaccacttagaggccttcgttggaaacgggtttttttcatgtaaggctagacagaagaattcccagtaacttccttgtgttgtgtgcattcaactcacagagttgaacgttcccttagacagagcagatttgaaacactctatttgtgcaatttgcaagtgtagttttcaagctctttaaggtcaatggcagaaaaggaaatatcttcgtttcaaaactagacagaatgattctcagaaactcctctgtgatgtgtgcgttcaactcacagagtttaacttttcttttcatagagcagttaggaaacactctgtttgtaaagtctacaagtggatattcagacctctgtgaggccctcgttggaaacgggatttcttcatattatgctagacagaagaattctcagtaacttccttgtgttgtgtgtattcaactcacagagttgaacgatcctttacacagagcagacttgaaacactctttttgtggaatttgcaagtggagatttcagccactttgaggtcaatagtagaaaaggaaatatcttcgtagaaaaactagacataatgattctcagaaacccatttgtgatgtgtgcgttccactcacagagtttaacctttcttttcatagagcagttaggaaacactctgtttgtaaagtctgcaaggggatatttagacctctttgaggccttcgttggaaacgggatttcttcatattctgctagacagaagaattctcagtaacttccttgtgttgtgtgtattcaactcacagagttgaactttcatttagagagagcagatttgaaacactgtttttgtggaatttgcaagtggagatttcaagcgctttgtggccaaaggcagaaaaggaaatatcttcgtataaaaactagacagaatcattctcagaaactgctctgcgatgtgtgcgttcaactctcagagtttaacttttcttttcattcaccagtttggaaacactctgtttgtaaagtctgcacgtggatattttgaccacttagaggccttcgttggaaacgggtttttttcctgtaaggctagacagaagaattcccaggaacttccttgttttgcgtacattcaactcacacatttgaacgttcccttagacagagtagatttgaaacactctttttgtgcaattggcaagtggtgatttcagccgctttgaggtcaatggtagaaaaggaaatatcttcgtataaaaactagacagaatgattctgagaaactcctttgtgatgtgtgcgttcaactcacacagtttaacctttcttttcatagagcagttaggaaacactctgtttgtaaagtctgcaagtggatattcagacgtccttgaggccttcgttggaaacgggatttcttcatattctgctagacagaagaattctcagtaaattccttgtgttgtgtgtattcaactcacagagttgaacgatcctttacacagagcagacttgaaactctctttttgtggaatttgcaagtggagatttcagccgctttgaggtcaatggtagaaaaggaaatatcttcgtatagaaacaagacagaatgattctcagaaacttctttgtgatgtgtgcgttcaactcacagagtttaacctttcttttcatggagcagttaggaaacactctgtttgtaaactctgcaagtggatattcagacctatttgaggccttcgttggaaacgggatttcttcatactgtgctagacagaagaattctcagtaacttccttgtgttgtgtgtttttaactgacagagttgaactttcatttagagagagcagatttgaaacactgtttttgtggaatttgcaagtggagatttcaagcgctgtggggccaaaggcagaaaaggaaatatcttcgtataaaaactagacagaatcattctcagaaactgctctgcgatgtgtgcgttcaactctcagagtttaacttttcttttcattcagctgtttggaaacactctgtttgtaaaatctgcacgtggacaatttgaccacttagaggccttcgttggaaacgggtttttttcatgtaaggctagacagaagaattctcagtaacttccttgtgtcgtgtgtattcaactcacagagttgaacgatcctttacacagagcagacttgtaacactctttttgtggaatttgcaagtggagatttcagccgctttgatgtcaaaggtagaaaaggaaatatcttcctataaaaactagacagaatcattcccacaaactgcgttgtgatgtgttcgttcaactcacagagtttaacctttctgttcatagagcagttaggaaacactctgtttgtaaagtctgtaagtggatattctgacatcttgaggccttcgttggaaacgggatttcttcatattctgctagacagaagaattcccagtaacttccttgtgttgtgtgcattcaactcacagagttgaacgatccttcacacagagcagattagaaacactctttttattggaatttgcaagtggagatttcagccgctttgaggtcaatggtagaaaaggaaatatcttcgtataaaaactagacagaatgattctcagaaactcctttgtgatgtgtgcgttcaactcacagagttcaacctttcttttcatagagcagttgggaaacactctgtttgtaaagtctgcaagtggatattcagacttctttgaggccttcgttggaagtgggatttcttcatgttctgctagacagaagaattctcagtaacttccttgtgttgtgtgtattcaactcacagagttgaacgatgctttacacagagcagacttgaaacactctttttgtggaatttgcaagtggagatttcagccgctttgtggtcaatagtagaataggaaatatcttcctatagaaactagacagaatgattctcagaaactcctttgtgatgtgtgcgttcaactcacagagtttaccctttcttttcatagagcagttaggaaacactctgtttgtaaagtctgcaagtggatattcagacatccttgaggctttcgttggaaacgggatttcttcatattctgccagaaagaagaattctcagtaacttccttgtgttgtgtgtattcaactcacagagttgaacgatcctttacacagtagcagacttgaaacactctttttgtggaatttgcaagtggagatttcagccgctttgaggtcaatggtagaataggaaatatcttcctatagaaactagacagaatcattctcagaaactgctgcgtgatgtgtgcgttcaactctcagagtttaacttttcttttcattcagcggtttggaaacactctgtttataaagtctgcacgtggatattttgaccacttagaggccttcgttggaaacgggttttttttcatgtaaggctacacagaagaatttccagtaacttccttgtgttgtgtgcattcaactcacagagttgaacgttcccttagacagagcagatttgaaacactctatttgtgcaatttgcaagtgtagatttcaagcgctttaaggtcaaaggcagaaaaggaaatatcttcgtttctaaactagacagaatcattcccacaaactgcgttgtgatgtgttcgttcaactcacagagtttaacctttctgttcatagagcagttaggaaacactctgtttgtaaagtctgtaagtggatattctgacatcttgcggccttcgttggaaacgggatttcttcatattatgctagacagaataattctcagtaacttccttgtgttttgtgtattcaactcacagagttgaacgatcctttacagagagcagagttgaaacactctttttgtggaatttgcaagtggagatttcagccgctttgaggtcaatggtagaaaaggaaatatcttcgtataaagactagacagaatgattctcagaaactcctttgtgatgtgtgagttcaactcacagagtttaacctttcttttcatagagcagttaggaaacactctgtttgtaaagtctgcaagtggatattcagacctctttgaggccttcgttggaaacgggatttcttcatattctgctagacagaagaattctcagtaacttccttgtattgtgtgtattcaactgacagagttgaactttcatttagagagagcagatttgaaatactgtttttgtggaatttgcaagtggagatttcaaacgctttggggccaaaggcagaaaaggaaatatcttcgtatgaaaactagacagaatcattctcagaaactgctctgcgatgtgtgcgttcgaactctcagagtttaacttttcttttcattcagcagtttggaaacactctgtttgtaaagtctgcacgtggatattttgaccacttagaggccttcgttggaaacgggtttttttcctgtcaggctagacagaagaattcccagtaacttccgtgtgttgtgtacattcaactcacagagttgaacgttcccttagacagagcagacttgtcacactctttttgtggaatttgcaagtggagatttcagccgctttgaagtcaaaggtagaaaaggaaatatcttcctataaaaactagacagaatgattctcagaaactcgtttgtgatgtgtgtgttcaactcacagagtttaacctttcttttcatagagcagttaggaaacactctgtttgtaaagtctgcaagtggatattcagacctctttgaggccttcgttggaaacggggttttttcatataaggctagacagaagaattctcagaaacttccttgtgttgtgtaatttcaactcacagagttgaacgatgctttacacagagtagacttgaaacactctttttgtggaatttgcaagtggagatttcagccgctttgaggtcaattgttgaaaaggaaatatcttcgtataaaaactagacagaatgattctcagaaactcctttgtgatgtgtgcgttcaactcacagagtttaacctttcttttcatagaggagttaggaaacactctgtttgtaaagtctgcaagtggatattcagacctctttgaggccttcgttggaaacgggtttttttcatataaggctagacagaagaattctcagtaacttccttgtgttgtgtgtattcaactgacagagttgaactttcatttagagagagcagattttaaacactgtttttgtggaatttgcaagtggagatttcaagcgctttggggccaaaggcagaaaaggaaatatcttcgtataaaaactagacagaatcattctcagaaactgctctgcgatgtgtgcgttcaactctcagagcttaacttttcttttcattcagcaatttggaaacactctgtttgtaaagtctgcacgtggataacttgaccacttagaggccttcgttggaaacgggtttttttcatgtaaggctagacagaagaattctcagtaacttccttgtgttgtgtgtattcaactcacagagttgaacgatcctttacacagagcagacttgtaacaccctttttgtggaatttgccagtggagatttcagccgctttgaagtcaaaggtagaaaaggaaatatcttcctataaaaactagacagaatcattcccacaaactgcgttgtgatgtgttcgttcaactcacggagtttaacctttcttttcatagagcagttaggaaacagtctgtttgaaaattctgtaagtggatattctgacagcttgtggccttcgttggaaacgggatttcttcatattctgctagacagaagaattctcagtaacttccttttgttgtgtgtattcaactcacggagttgaacgatcctttacacagagcagagttgaaacactctttttgtggaatttgcaagtggagatttcagccgctttgaggtcaatagtagaaaaggaaatatcttcgtagaaaaactagacagaatgattttcagaaactcctttgtgatgtgtgcgttcaactcacagagtttaacctttcttttcatagagcagttaggaaacactctgtttgtaaagtctgcaagtggatattcagatatccttgaggttttcgttggaaacgggatttcttcatattctgctagaaagaagaattcccagtaacttccttgtgttgtgtgtgttcaactcacagagttcaactttcatttacccagagcagatttgaaacactctttttgtggaatttgcaagtggagatttcaagcgctttgaggccaaaggcagaaaaggaaatatcttcgtttcaaaactagacagaatcattctcagaaactgctctgcgatgtgtgcgttcaactctcagagtttaactttgcttttcattcagcagtttggaaacactctgtttgtaaagtctgcacgtggataatttgaccacttagaggccttcgttggaaacgggtttttttcatgtaagcctagacagaagaattccccgtaacttccttgtgttgtgtacattcaactcacagagttgaacgttcccttagacagagcagatttgaaacactctttttgtgcaattggcaaatggagatttcaagcgctttaaggtcaatggcagaaaaggaaatatcttcgtttcaaaactagacagaatcattcccacaaactgcgttgtgatgggttcgttcaactcacagagtttaacctttccgttcatagagcagttaggaaacacactgtttgtaaagtctgtaagtggatattctgacatccttgtggccctcgttggaaacgggatttcttcatattctgctagacagaagaattctcagtaacttccttgtgttgtgtgtattcaactcacagagttgaacgatcctttacacacagcagacttgaaacactctttttgtggaatttgcaagtggagatttcagccgctttgaggtcaatggtagaataggaaatatcttcctatagaaactagacagaatgattctcagaaactcctttgtgatgtgtgcgctcaactcacagagtttaacctttcttttcatagagcagttaggaaacactctgtttgtaaagtctgcaagtggatattcagacctctttgaggccttcgtaggaaacgggatttcttcatattatgctagagagaagaatactcagtaacttccttgtgttgtgtgtattcaactgacagagttgaactttcatttagagagagcagatttgaaatactgtttttgtggaatttgcaagtggagatttcaaacgctttggggccaaaggcagaaaaggaaatatcttcgtataaaaactagacagaatcattctcagaaactgctctgcgatgtgtgcgttcaactctcagagtttaacttttcttttcattcagaagtttggaaacactctgtttgtaaagtctgcacgtggataacttgaccacttagaggccttcgttggaaacgggtttttttcatgtaaggctagacagaagaattcccagtaacttccttgtgttgtgtacattcaactcacagagttgaacgttcccttagagcagatttgaaacactctttttgtgcaattggcaaatggagatttcaagcgctttaaggtcaatggcagaaaaggaaatatcttcgtttcaaaactagacagaatcattcccacaaacagcgttgtgatgtgttcgttcaactcacagagtttaacctttcttttcatagagcagttaggaaacagtctgtttgaaaattctgtaagtggatattctgacatcttgtggccttcgttggaaacgggatttcttcatattctgctagacagaagaattctcagtaacttccgcgtgttgtgtgtattcaactcacagagttgaacgatcctttacacagagcagacttgaaacactctttttgtggaatttgcaagtggagatttcagccgctttgaggtcaatggtagaaaaggaaatatcttcgtataaaaactagacagaatgattctcagaaactcctttgtgatgtgtgcgttcaactcacagagtttaacctttcttttcatagagcagttaggaaacactctgtttgtaaagtctgcaagtggatattcagacatctttgaggctttcgttggaaacgggatttcttcatattctgctagaaagaagaattcccagtaacttccttgtgttgtgtgtgttcaactcacagagttgaactttcacttacacagagcagatttgaaacactctttttgtggaatttgcaagtggagatttcaagcgctttgaggccaaaggcagaaaaggaaatatcttcgtttcaaaactagacagagtcattctcagaaactgctgcgtgatgtgtgcgttcaactctcagagtttaacttttcttttcattcagcggtttggaaacactctgtttgtaaagtctgcatgtggaaattttgaccacttagaggccttcgttggaaacgggtttttttcatgtaaggctagacagaagtattcccagtaacttccttctgttgtgtgcattcaactcacagagttgaacgttcccttagacagagcagatttgaaacactctatttgtgcaatttgcaagtgtagatttcaagcgctttaaggtcaacggcagaaaaggaaatatcttcgtttcaaaactagacagaatcattcccacaaactgcgttgtgatgtgttcgttcaactcacagagtttaacctttcttttcatagagcagttaggaaacagtctgtttgaaaactctgtaagtggatattctgacatcttgtggccttcgttggaaacgggatttcttcatattctgctagacagaagaattctcagtaacttcccttgtgttgtgtgtattcaactcacagagttgaacgatcctttacacagagcagacttgaaacacactttttgtggaatttgcaagtggagatttcagccgttttgaggtcaatggtagaaaaggaaatatcttcgtataaagactagacagaaatgattctcagaaactcctttgtgatgtgtgcgttcaactcacagagtttaacctttcttttcatagagcagttaggaaacactctgcttgtaaagtctgcaagtggatattcagccctctttgaggccttcgttggaaatgggtttttttcatataaggctagacagaagaattctcagtaacttccttgtgttgtgtgtattcaactgacagagttgaactttcatttagacagagcagatttgagacactctttttgtggaatttgcaaaggtagatttcatgcgctttgaggccaaaggcagaaaaggaaatatcttcgtataaaaactagacagaatcattctcagaaactgctctgcgatgtgtgcgttcaactctcagagtttaacttttcttttcattcagcagtttggaaacactctgtttgtaaagtctgcacgtggataatttgaccacttagaggccttcgttggaaacgggttttttcctgtaaggctagacagaagaattcccagtaacttccttgtgttgtgtgcattccactcacagagttgaacgttcctttagacagagcagatttgaaacactctatttgtgcaatttgcaagtgtagatttcaagcgctttaaggtcaatggcagaaaaggaaatatcttcgtttcaaaactagacagaatcattcccaaaaactgcgttgtgatgtgttcgttcagctcacagagtttaacctttcttttcatagagcagttaggaaacagtctgtttgtaaattctgtaagtggatattctgacatcttgtggccttcgttggaaacgggatttcttcatattctgctagacagaagaattctcagtaacttccttgtgttgtgtgtattcaactcacagagttgaacgatcctttacacagagcagacttgaaacactctttttgtggaatttgcaagtggagatttcagccgctttgaggtcaatggtagaaaagtaaataacttcgtataaagactagacagaatgattctcagaaactcctttgtgatgtgtgcgctcaactcacagagtttaacctttcttttcatagagcagttaggaaacactctgtttgtaaagtctgcaagtggatattcagacctctttgaggccttcgtaggaaacgggatttcttcatattatgctagacagaagaattctcagtaacttccttgtgttgtgtgtattcaactgacagagttgaactttcatttagagagagcagatttgtaacactgtttttgtggaatttgcaagtggagatttcaagcgctttgcggccaaaggcagaaaaggaaatatcttcgtataaaaactagacagaatcattctcagaaaatcctctgtgatgtgtgcgttcaactctcagagtttaacttttcttttcattcagcagtttggaaacactctgtttgtaaagtctgcacgtggatattttgaccacttagaggccttctttggaaacgggtttttttcatgtaagtgtagacagaagaattcccagtaacttccttgtgttgtgtgcattcaactcacagagttgaacgttcccttagacagagcacatttgaaacactctatttgtgtaatttgcaagtgtagatttcaagcgctttaaggtcaacggcagaaaaggaaatatcttcgtttcaaaactagacagaatcattctcagaaactgctctgcgatgtgtgcgttcaactctcagagtttaacttttcttttcattcagcagtttggaaacactctgtttgtaaagtctgcaagtggatattcagacctctttgaggccttcgttggaaacgggatttcttcatactatgctagacagaagaattctcagtaacttccttgtgttgtgtgtattcaactcacagagttgaatgatcctttacacagagcagacatgaaacactctttttgtggaatttgcaagtggagatttcagccgctttgaggtcaatggtagaaaagggaatatcttcgtatagaaactagacagaatgattctcagaaactcctttgtgatgtgtgcgttcagctcacagagtttaacctttcttttcatagagcagttaggaaacactctgtttgtaaagtctgcaagtggatattcagacctctttgaggccttcgttggaaacgggatttcttcatattctgctagacagaacaattctcagtaacttccttgtgttgtgtgtgttcaactcacagagttgaactttcatttacacagagcagatttgaaacactctttttgtggaatttgcaagtggagatttcaagcgctttgaggccaaaggcagaaaaggaaatatcttcgtataaaaactagacagaatcattctcagaaactgctgcgtgatgtgtgcgttcaactctcagagtttaacttttcttttcattcagcggtttggaaacactctgtttgtaaagtctgcacgtggatattttgaccacttagaggccttcgttggaaacgggtttttttcatataaggctagacagaagaattctcagtaacttccttgtgttgtgtgtattcaactcacacagttgaacgatcctttacacagagtagacttgtaacactctttttgtggaatttgcaagtggagatttcagccgctttgaagtcaaatgtagaaaaggaaatatcttcctataaaaactagacagaacgattctcagtaaactcctttgtgatgtgtgcgttcaactcacagagtttaacctttcttttcatagagcagttaggaaacactctgtttgtaaagtctgcaagtggatattcagacctctttgaggccttcgttggaaacgggatttcttcatattctgctagacagaagaattctcagtaacttctttgtgttgtgtgtattcaactcacagagttgaacgatcctttacacagagcagacttgaaacactctttttgtggaatttgcaagtggagatttcagccgctttgaggtcaatagtagaaaaggaaatatcttcgtagaaaaactagacagaatgattctcagaaactcctttgtgatgtgtgcgttcaactcacagagttcaacctttcttttcatagagcagttgggaaacactctgtttgtaaagtctgcaagtggatattcagacttctttgaggccttcgttggaagcgggatttcttcatgttctgctagaaagaagaattcccagtaacttccttgtgttgtgtgtgttcaactcacagagttgaactttcatttacccagagcagatttgaaactctctttttgtggaatttgcaagtggagatttcaagcgctttgaggccaaaggcagaaaaggaaatatcttcgtttcaaaactagacagaatcattctcagaaactgctgcgtgatttgtgcgttcaactctcagagtttaacttttcttttcattcagcggtttggaaacactctgtttgtaaagtctgcacgtggatattttgaccacttagaggccttcgttggaaacgggtttttttcatgtaaggctagacagaagaattcccagtaacttccttgtgttgtgtgcattcaactcacagagttgaacgttcccttagacagagcagatttgaaacactctatttgttcaatttgcaagtgtagatttcaagcgctttaaggtcaacggcagaaaaggaaatatcttcgtttcaaaactagacagaatcattcccacaaactgcgttgtgatgtgttcgttcaactcacagagtttaacctttcttttcatagagcagttaggaaacagtctgtttgtcaattctgtaagtggatattctgacatcttgtggccttcgttggaaacggaatttcttcatattctgctagacagaagaattctcagtaacttccttgtgttgtgtgtattcaactcacagagttgaacgatcctttacacagagcagacttgaaatactctttttgtggaatttgcaagtggagatttcagccgctttgaggtcaatggtagaaaagggaatatcttcgtatagaaactagacagaatgattctcagaaactcctttgtgatgtgtgcgttcaactcacagagtttaacctttcttttcatagagcagttaggaaacactctgtttgtaaagtctgcacgtggatatttggacttctttgaggccttcgttggaaacgggtttttttcatgtaaggctagacagaagaattttcagtaacttccttgtgttgtgtgtattcaactgacagagttgaactttcatttaaagagagcagatttgtaacactgtttttgaggaatttgcaagtggagatttcaagcgatttgcggccaaaggcagaaaaggaaatgtcttcgtataaaaactagacagaatcattctcagaaactgctgcatgatgtgtgcgttcaactctcagagtttaacttttcttttcattcagcggtttggaaacactctgtttgtaaagtctgcacctggatattttgacgacttagacgccttcgttggaaacgggtttttttcatgtaaggctagacagaagaattcccagtaacttccttgtgttgtgtgcattcaactcaaagagttgaacgttccattagacagagcagatttgaaacactctatttgtgcaatttgcaagtgtagatttcaagcgctttaaggtcaatggcagaaaaggaaatatcttcgtttcaacacaagacagaatcattctcacaaactgcgttgtgatgtgttcgttcaactcacagagattaacctttctgttcatagagcagttaggaaacactctgtttgtaaagtctgtaagtggatattctgacatcttgtggccttcgttggaaacgggatttcttcatattctgctagacagaagaattctcagtaacttccttgtgttgtgtgtattcaactcacagagttgaacgatcctttacacagggcagacttgaaacactctttttgtggaatttgcaagtggagatttcagccgctttgaggtcaatggtagaaaagggaatatcttcgtttagaaactagactgaatgattctcagaaactcctttgtgatgtgtgcgttcaactcacagagtttaacctttcttttcatagagcagttaggaaatactctgtttgtaaagtctgcaagtggatattcagacatccttgaggctttcgttggaaacgggatttcttcatattctgctagaaagaataattctcagtaacttccttgtgttgtgtgtattcaactcacagtgttgaacgatcctttacagagagcagacttgaaacactctttttgtggaatttgcaagtggagatttcagccgctttgaggtcaatggtagaataggaaatatcttcctatagaaactagacagaatcattctcagaaactgctctgtgatgtgtgcgttcaactctcagagtttaacttttcttttcattcagcagtgtggaaaaactctgtttctaaagtctgcacgtggatattctgaccacttagaggccttcgttggaaacgggtttttttcctgtaaggctagacagaagaattcccagtaacttccttgtgttgtgtgcattcaactcacagagttgaacgttcccttagacagagcagatttgaaacactctatttgtgcaatttgcaagtgtagatttccagctctttatggtcaacggcagaaaaggaaatatcttcgtttcaaaactagacagaatgattctcagaaactcctttgtgatgtgtgcgttcaactcacagagtttaacctttcttttcatagagcagttaggaaacactctgtttgtaaagtctgcaagtggatattcagacatccttgaggctttcgttggaaacgggatttcttcatattctgctggaaagaagaattctcagaatcttccttgtgttgtgtgtattcaactcacagagttgaacgatgatttacacagagcagatttgaaacactctttttgtggaatttgcaagtggagatttcagccgctttgaggtcagtggtagaaaaggaaatatcttcatataaaaattagacagaatgattctcagaaactcctttgtgatgtgtgcgttcaactcacagagtttaacctttcttttcatagagcagttaggaaacactctgtttgtaaagtctgcaagtggatattctgacctccttgaggccttcgtgggaaacgggatttcttcatattctgctagacagaagaattctcagtaacttccttgtgttgtgtgtattcaactgacagagttgaactttcatttagagagagcagatttataacactgtttttgtggaatttgcaagtggagatttcaagcgctttggggccaaaggcagaacaggaaatatcttcgtataaaaactagacagaatcattctcagaaaatgctctgtgatgtgtgcattcaactctcagagtttaacgtttcttttcattcagcagtttggaaacactctgtttgtaaagtctgcacgtggatattttgaccacttagaggccttcgttggaaacgggtttttttcatgtaagggtagacagaagaattcccagtaacttgccttgtgttgtgtgcattcaactcacagagctgaacgttcccttagacagagcagatttgaaacactctatttgtgcaatttgcaagtgtagatttcaagcgctttaaggtcaatggcagaaaaggaaatatgcttcgtttcaaaactagacagaatgattctcagaaactcctttgtgatgtgtgcgttcaactcacagagtttaacctttctttttatagagcagttaggaaacactctctaaagtctgcaagtggatattcagacctccttgacgtcttcgttggaaacgggatttcttcatattctgctagacagaagaattctcagtaacttccttgtattgtgtgtattcaactcacagagttgaacgatcctttacacagagcagacttgaaacactctctttgtggaatttgcaagtggagatttcagccgctttgaggtcaatggtagaataggaaatatcttcctatagaaacaagacagaatgattctcagaaactcctttgtgatgtgtgcgttcaactcacagagtttaacctttcttttcatagagcagttaggaaacactctgtttgtaatgtctgcaggtggatattcagacatctttgaggctttcgttggaaacgggatttcttcatattctgctatacagaagaattctcattaacttccttgtgttgtgtgtattcaactgacagagttgaactttcatttagagagagcagatttgaaacactgtttttgtggaatttgcaagtggagatttcaagcgctttggggccaaaggcagaaaaggaaatatcttcgtataaaaactagacagaatcattctcagaaaactgctgcgtgatgtgtgcgttcaactctcagagtttaacttttcttttcattcagcggtttggaaacactctgtttgtaaagtctgcacgtggatattttgaccacttagaggccttcgttggaaacgggttttttttcatgtaaggctagacagaagaattcccagtaacttccttgtgttgtgtacattcaattcacagagttgaacgttcccttagacagagcagatttgaaacactctttttgtgcaattggcaagtggagatttcaagcgctttaaggtcaatggcagaaaaggaaatatcttcgtttcaaaactagacagaatcattcccacaaactgcgttgtgatgtgttcgttcaacccacagagtttaacctttctgttcatagagcagttaggaaacactctgtttgtaaagtctgaaagtggatattctgacatcttgtggccttcgttggaaacgggatttcttcatattctgctagacagaagaattctcagtaacttccttgtgttgtgtgtattcaactcacagagttgaacgatcctttacagagagcagacttgaaacactctttttgtggaatttgcaagtggagatttcagccgctttgaggtcaatagtagaataggaaatatcttcgtagaaaaactagacagaatgattctcagtaactcctttgtgatgtgtgcgttcaactcacagagtttaacctttcttttcatagagcagttaggaaacactctgtttgtagagtctgcaagtggatattcagacctccttgaggccttcgttggaaacgggatttcttcctattatgctagacagaagaattctcgggaacttccttgtgttgtgtgtattcaactgacagagttgaactttcatttagagagagcagatttgaaacactgtttttgtggaatttgcaagtggagatttcaaacgctttggggccaaaggcagaaaaggaaatatattcctataaaaactagacagaatcattctcagaaactgctgcgtgatgtgtgcgttcaactctcagagtttaacttttcttttcattcagcggtttggaaacactctgtttgtaaagtctgcccgtggatattttgaccacttagaggccttcgtgggaaacgggtttttttcacgtaaggctagacagaagaattcccagtaacttccttgtgttgtgtgcattcaactcacagagttgaacgttcccttagacagagcagatttgaaatactctatttgtgcaatttgcaagtgtagatttcaagcgctttaaggtcaacggcagaaaaggaaatatcttcgtttcaaaactagacagaatgattctcagaaacttcattgtgacgtgtgcgttcaactcacagagtttaacctttcttttcatagagcagttaggaaacactctgtttgtaaagtctgcatgtggatattcagacctctttgaggccttcgttggaaacgggatttcttcatactgtgctagacagaagaattctcagtaacttccttgtgttgtgtgtattcaactcacagagttgaacgatcctttacacagagcggacttgaaacacactttttgtggaatttgcaagtggagatttcagccgcgttgaggtcaatggtagaaaaggaaatatcttcgtataaaaactagacagaatgattctcagaaactcctttgtgatgtgtgcgttcaactcacagagtttaacctttcttttcatagagcagttaggaaacactctgtttgtaaagtctgcaagtggattctcagtcctctttgaggctttctttggaaacggcatttcttcatattatgctagacagaagaattcccagtaacttcattgtgttgtgtgtgttcaactcacagagttgaacttccatttacacagagcagatttgaaacactctttttgtggaatttgcaagtggagatttcaagcgatttgaggccaaaggcagaaaaggaaatatcttcgtttcaaaactagacagaatcattctcagaaactgctgcgtgatgtgtgcgttcaactctcagagtttaacttttcttttcattcagcggtttggaaacactctgtttgtaaagtctgcacgtggaaattttgaccacttagatgccttcgttggaaacgggtttttttcatgtaaggctagacagaagaattcccagtaacttccttgtgttgtgtgcattcaactcacagagttgaacgttcccttagacagagcagatttgaaaaactctatttgtgcaatttgcaagtgtagatttcaagcgctttaaggtcaacggcagaaaaggaaatatcttcgtttcaaaactagacagaatcattcccacaaactgcgttgtgaagtgttcgttcaactcacagagtttaacctttctgttcatagagcagttaggaaacactctgtttgtaaagtctgtaagtggatattctgacatcttgtggccttcgttggaaaagggatttcttcatattctgctagacagaagaattctcagtaacttccttgtgttgtgtgtattcaactcacagagttgaacgatcctttacacagagcagacttgaaacactctttttgtggaatttgcaagtggagatttcagccgctttggggtcaatggtagaaaaggaaatatcttcgtataaaaactagacagaatgattctcagaaactcctttgtgatgtgtgcgttcaactcacagagttcaacctttcttttcatagagcagttgggaaacactctgtttgtaatgtctgcaagtggatattcagacttctttgaggccttcgttggaagcgggatttcttcatgttctgctagacagaagaattctcagtaacttccttgtgttgtgtgtattcaactcacacagttgaacgatcctttacacagagcagacttgtaacactctttttgtggaatttgcaagtggagatttcagccgctttgaagtcaaaggtagaaaaggaaataacttcctataaaaactagacagaatgattctcagaaactcctttgtgatgtgggtgttcaactcacagagtttaacctttcttttcgtagagcagttaggaaacactgtgattgtaaagtctgcaagtggatattccgacctctttgaggccttcgttggaaacgggtttttttcatataagactagacagaagaattctcagtaacttccttgtgttgtgtgtattcaactgacagagttgaactttcatttagagagaacagatttgaaacactgtttttgtggaatttgcaagtggagatttcaagcgctttggggccaaaggcagaaaagggaatatcttcgtagaaaaacaagacagaatcattctcagaaactgctctgcgatgtgtgcgttcaactctcagagtttaacttttcttttcattcagcagtttggaaacactctgtttgtaaagtctgcacgtggatattttgaccacttagaggccttcgttggaaacgagtttttttcctgtaaggctagacagaagaattccccgtaacttccttgtgttgtgtgcattcaactcacagagttgaacgttcccttagacagagcagatttgaaacactctatttgtgcaatttgcaagtgtagatttcaagcgctttaaggtcaatggcagaaaaggaaatatcttcgtttcaaaactagacagaatcattcccacaaactgcgttgtgatgtgttcgttcaactcacagagtttaacctttccgttcatagagcagttaggaaacactctgtttgtaaagtctgtaagtggatattctgacatcttgtggccatcgttggaaacgggatttcttcatattctgctagacagaagaattctcagtaacttccttgtgttgtgtgcatttaactcacagagttgaacgatcctttacacagagcagacttgaaacactctttttgtggaatttgcaagtggagatttcagccgctttgaggtcaatggtagaaaaggaaatatcttcgtataaagactagacagaatcattctcagaaagtcctttgtgatgtgtgtgttcaactcacagagtttaacctttcttttcatagagcagttagtaaacactctgtttataaagtctgcaagtggatattcagacccctttgaggccttcgttggaaacgggatttcttcatattatgctagacagaagaattcccagtaacttccttgtgttgtgtgtgttcaactcacagagttgaacttccatttacacagagcagatttgaaacactctttttgtggaatttgcaagtggagatttcaagcgatttgaggccaaaggcagaaaaggaaatatcttcgtttcaaaactagacagaatcattctcagaaactgatgcgtgatgtgtgcgttcaactctcagagtttaacttttcttttcattcaggggtttggaaacactctgtctgtaaagtctgcacgtggatattttgaccacttagaggccttcgttggaaaagggtttttttcatgtaaggctagacagaagaattcccagtaacttccttgtgttgtgtgcattcaactcacagagttgaacgttcccttagacagagcacatttgaaacactctatttgtgcaatttgcaattgtagatttcaagcgctttaaggtcaatggcagaaaaggaaatatcttcgttttaaaactagacagaatcattcccacaaactgcgttgtgatgtgttcgttcaactcacagagttttacctttctgttcatagagcagttaggaaacactctgtttgtaaagtctgtaagtggatattctgacatcttgtggccttcgttggaaatgggatttcttcatattctgctagacagaagaattctcagtaacttccttgtgttgtgtgtattcaactcacagagttgaacgatcctttacacagagcagacttgaaacactctttttgtggaatttgcaagtgtagatttcagccgctttgaggtcaatagtagaaaaggaaatatcttcgtagaaaaactagacagaatgattctcagaaactcctttgtgatgtgtgcgttcaactcacagagtttaacctttcttttcatagagcagttaggaaacactctgtttgtaaagtctgcaagtggatattcagacctctttgaggccttcgttggaaacgggtttttttcttgtaaggctagacagaagaattcccagtaacttccttgtgttgtatacattcaactcacagagttgaacgttcccttagacagagcagatttgaaacactctttttgtgcaattggcaagtggtgatttcagccgctttgaggtcaatggtagaaaagggaatatcttcgtataaaaactagacagaatcattctcagaaactgctctgcgatgtgtgcgttcaactctcacagtttaacttttcttttcattcagcagtttggaaacactctgtttgtaaagtctgcacgtggataatttgaccacttagaggccttcgttggaaacgggttattttcatgtaagtctagacagaagaattcccagtaacttccttgtgttgtgtgcattcaactcacagagctgaacgttcccttagacagaacagatttgaaacactctatttgtgcaatttgcaagtgtagatttcaagcgctttaaggtcaacggcagaaaaggaaatatcttcgtttcaaaactagacagaatcattcccacaaactgcgttgtgatgtgttcgttcaactcacagagtttaacctttctgttcatagagcagttaggaaacactctgtttgtaaagtctgcaagtggatattctgacatcttgtggccttcgttggaaacgggatttcttcctattctgctagacagaagaattctcagtaacttccttgtgttgtgagtattcaactcacagatttgaacgatcctttacacagagcagacttgaaacactctttttgtggaatttgcaagtggagatttcagcctctttgaggtcaatggtagaataggaaatatcttcctatagaaactagacagaatgattctcagaaactcctttgtgatgtgtgcgttcaactcagagagtttaacctttcttttcatagagcagttaggaaacactccgtttgtaaagactgcaagtggatattcagacctctttgaggccttctttggaaacgggatttcttcatattatgctagacagaagaattctcagtaacttccttgtgttgtgtgtattcaactgacagagttgaactttcatttagagagagcagatttgaaacactgtttttgtggaatttgcaagtggagatttcaagcgctttggggccaaaggcagaaaaggaaatatcttcgtagaaaaactagacagaatcattctcagaaactgctctgcgatgtgtgcgttcaactctcagagtttaacttttcttttcattcagaagtttggaaacactctgtttgtaaagtctgcacgtggataacttgaccacttagaggccttcgttggaaacgggtttttttcatgtaaggctagacagaagtattcccagtaacttccttgtgttgtgtacattcaactcacagagttgaacgttcccttagacagagcagatttgaaacacactttttgtgcaattggcaagtggagatttcaagcgctttaaggtcaatggcagaaaaggaaatatcttcgtttcaaaactagacagaatcattcccacaaactgcgttgtgatgtgttcgttcaactcacagagtttaacctttcttttcatagagcagttaggaaacagtctgtttgtaaattctgtaagtggatattctgacatcatgtggccttcattggaaacgggatttcttcatattctgctagacagaagaattcccagtaacttccttgtgttgtgtgtattcaactcacagagttgaccgatcctttacacagagcagacttgtaacactctttttgtggaatttgcaagtggagatttcagccgctttgaagtcaaaggtagaaaagggaatatcttcctataaaaactagacagaatgattctcagaaactcctttgtgatgtgtgtgttcaactcacagagtttaacctttcttttcatagagcagctagtaaacactctgtttataaagtctgcaagtggatattcagacccctttgaggccttctttggaaacgggatttcttcatattctgctagacagaagaattctcagtaacttccttgtgttgtgtgtattcaactgacagagttgaactatcatttagagagagcagatttgaaacactgtttttgtggaattggcaagtggagatttcaagcgctttggggccaaaggcagaaaaggaaatatcttcgtataaaaactagacagaatcattctcagaaactgctctgcgatgtgtgcgttcaactctcagagtttaacttttcttttcattcagcagtttggaaacactctggttgtaaagtctgcacgtggataacttgaccacttagaggccttcgttggaaacgggtttttttacctgtaaggctagacagaagaattcccagtaacttccttgtgttgtgtacattcaactcacagagttgaacgttcccttagacagagcagatttgaaacactctttttttgcaattggcaaatggagatttcaagcgctttaaggtcaatggcagaaaaggaaatatcttcgtttcaaaactagacagaatgattctcagaaactcttttgtgatgtgtgcgttcaactcacacagtttaacctttcttttcatagagcagttaggaaacactgtttgtaaagtctgcaagtggatattcagacctccttgaggccttcgttggaaacgggatttcttcatattatgctagacagaagaattctcagtaacttccttgtgttgtgtgtattcaactcacagagttgaacgatcctttacacagagcagacttgaaacactctttttgtggaatttgcatatggagacttcagccgctttgaggtcaatggtagaataggaaatatcttcctatagaaactagacagaatgattctcagaaacttctttgtgatgtgtgcgttcaactcacagagtttaacctttcttttcatagagcagttaggaaacactctgtttgtaaactctgcaagtggatgttcagacctctttgaggccttggttggaaacgggatttcttcatactatgctagacagaagaattctcagtaacttccttgtgttgtttgtattcaactgacagagttgaactttcatttagagagagcagatttgaaacactgtttttgtggaatttgcaagtggagatttcaagcgctttggggccaaaggcagaaaaggaaatatcttcgtataaaaactagacagaatcattctcagaaactgctgcgtgatgtgtgcgttcaactctcagagtttaacttttcttttcattcagcggtttggaaacactctgtaaagtctgcacgtggatattttgaccacttagatgccttcgttggaaacgggtttttttcatgtaaggctagacagaagaattcccagtaacttccttgtgttgtgtgcattcaactcacagagttgaacgttcccttagacagagcagatttgaaacactctatttgtgcaatttgcaagtgtagatttcaagcgctttaaggtcaatggcagaaaaggaaatatcttcgtttcaaaactacagagaatcattcccccaaactgcgttgtgatgtgttcgttcaactcacagagtttaacctttcttttcatagagcagttaggaaacagtctgtttgtcaattctgtaagtggatattctgacatcttgtggccttcgttggaaacgggatttcttcatattctgctagacagaagaattctcagtaacttccttgtgttgtgtgtattcaactcacagggttgaacgatcctttacacagagcagacttgtaacactctttttgtggaatttgcaagtggagatttcagccgctttgaagtcaaaggtagaaaaggaaatatcttcctataaaaactagacagaatgattctcagaaacttctttgtgatgtgtgcgttcaactcacagagtttaacctttcttttcatagagcagttaggaaacactctgtttgtaaactctgcaagtggatattgagacctctttgaggccttcgttggaaacgggatttcttcatactgtgctagacagaagaattctcagtaacttccttgtgttgtgtgtattcagctgacagagttgaactatcatttagagagagcagatttgaaacactgtttttgtggaattggcaagtggagatttcaagcgctttggggccaaaggcagaaaaggaaatatcttcgtataaaaactagacagaatgattctcagaaactgctctgcgatgtgtgcgttcaactctcagagtttaacttttcttttcattcagcagtttggaaacactctgtttgtaaagtctgcacgtggataatttgaccacttagaggccttcgttggaaacgggtttttttcatgtaaggctagacagaagaattctcagtaacttccttgtgttgtgtgtattcaactcacagagttgaacgatcctttacacaaagcagacttgtaacactctttttctggaatttgcaagtggagatttcagccgctttgaagtcaaaggtagaaaaggaaatatcttcctataaaaactagacagaaatcattcccacaaactgcgttgtgatgtgttcgttcaactcacagtagtttaacctttctgttcatagagcagttaggaaacactctgtttgtaaagtctgtaagtggatattctgacatcttgtggccttcgttggaaacgggatttcttcatattctgctagacagaagaattctcagtaactttccttgtgttgtgtgtattcaactcacagagttgaacgatcctttacacagagcagacttgaaacattctttttgtggaatttgcaagtggagattttagccgctttgaggtcaatggtagaataggaaatatgttcctatagaaactagacagaatgattctcataaactcctttgtgatgtgtgcgttcaactcacagaatttaacctttcttttcatagcgcagttaggaaacactctgtttgtaaagtctgcaagtggatattcagacatcttttaggccttcgttggaaacgggatttcttcatattatgctagacagaagaattctcagtaacttccttgtgttgtgtttattcaactcacagatttgaatgatcctttacacagagcagacttgaaacaccctttttgtggaatttgcaagtggagatttcagccgatttgaagtcaatggtagaaaagtaaatatcttcgtataaagactagacagaatcattctcagaaactgctgcgtgatgtgtgcgatcaactctcagagtttaacttttcttttcattcagcggtttggaaacactctgtttgtaaagtctgcacgtggaaattttgaccacttagagaccttcgttggaaacgggattttttcatgtaaggctagacagaagaattcccagtaacttccttgtgttgtgtacattcaactcacagagttgaacgttcccttaaacagagcagatttgaaacactctttttgtgcaattggcaagtggagatttcaagcgctttgaggtcaatggcagaaaaggaaatatcttcgtttcaaaactagacagaatgattctcagaaaactcctttgtgatgtgtgcgttcaactcacagaatttaacttttcttttcatagagcagttaggaaacactctgtatgtaaagtctgcaagtggatattcagacctcttttgaggccttcgttggaaacgggatttcttcatattctgctagacagaataattctcagtaacttctttgtgttgtgtgtattcaactcacagagttgaaggatcctttacagagagcaggcttgaaacactctttttgtcgaatttgcaagtggagatttcagccgctttgaggtcaatggtagaataggaaatatcttcttatagaaactagacagaatgattctcagaaacttctttgtgatgtgtgtgttcaactcacagagtttaacctttcttttcatagagcagttaggaaacactctgcttgtaaagtctgcaagtggatattcagacctcgttgaggccttcgttggaaacgggatttcttcatattctgctagacagaagaattctcagtaacttccttgtgttgtgtgtattcaactgacagagttgaactttcatttagagagagcagatttgaaacactgtttttgtggaatttgcaagtggagatttcaagcgctttggggccaaaggcagaaaaggaaatatcttcgtataacaactagacagaatcattctcagaaactgctgcgtgatgtgtgcgttcaactctcagcagtttaacttttcttttcattcagcggtttggaaacactctgtttgtaaagtctgcacgtggatattttgaccacttagagaccttcgttggaaacgggtttttttcatgtaaggctagacagaagaattcccagtaacttccttgtgttgtgtgcattcaactcacagagttgaacgttcccttagacagagcagatttgaaacactctatttgtgcaatttgcaagtgtagttttcaagctctttgaggtcaacggcagaaaaggaaatatcttcgtttcaaaactagacagaatcattcccacaaactgcgttgtgatgtgttcgttcaactcacagagtttaacctttctgttcatagagcagttaggaaacactctgtttgtaaagtctgtaagtggatattctgacatcttgtggccttcgttggaaacgggatttcttcatattctgctagacagaagaattctcagtaacttccttgtgttgtgtgtattcaactcacagagttgaacgttcctttacacagagcggacttgaaacactctttttgtggaatttgcaagtggagatttcagccgctttgaggtcaatggtagaaaaggaaatatcttcctataaaaactagacagaatgattctcagaaactcctttgtgatgtgtgcgttcaacacacagagttaaacttttcttttcatagagcagttaggaaacactctgtttgtaaagtctgcaagtggatattcagacctctttgaggccttcgttggaaacgagatttcttcatattatgctagacagaagaattctcagtaactttcttgtgttgtgtgtattcaactgtgagagttgaactttcatttagagagaccagatttgaaacactgtttttgtggaatttgcaagtggagatttcaagcgctttggggccaaaggcagaaaaggaaatatcttcgtataaaaactagacagaatcattctcagaaactgctctgcgatgtgtgcgttcaactctcagagtttaaatttgcttttcattcagcagttcggaaacactctgtttgtaaagtctgcacgtggataatttgaccacttagaggccttcgttggaaacgggtttttttcatgtaaggctagacagaagaattcccagtaacttccttgtgttgtgtgcattcaactcacagagttgaacgttcccttagagcagatttgaaacactctatttgtgcaatttgcaagtgtagatttcgagcgctttaaggtcaatggcagaaaaggaaatatcttcgtttcaaaactagacagaatcattcccacaaactgcgttgtgatgtgttcgttcaactcacggagtttaacctttctgttcatagagcagttaggaaacactctgtttgtaaagtctgcaagtggatattcagacctccttgaggccttcgttggaaacgggatttcttcatattctgctagacagaataattctcagtaacttccttgtgttgtgtgtattcaactcacagacttgaacaatcctttacacagagccgacttgaaacactctttttgtggaatttgcaagtggagatttcagccgctttgaggtcaatggtagaaaaggaaacatctccgtataaagactagacagaatgattctcagaaaatcctttgtgatgtgtgcgttcaactcacagagtttaacttttcttttcatagagcagttaggaaacactctgtttgtaaagtctgcaagtggatattcagatctctttgaggccttcgttggaaacgggatttcttcatattctgctagacagaagaattcccagtaacttccttgtgttgtgtgtgttcaactcacagagatgaactctcatttacacagagcagagttgaaacactctttttgtggaatttgcaagtggagatttcaagcgctttgaggccaaaggcagaaaaggaaatatcttcgtataaaaactagacagaatcattctcagaaactgctctgtgatgtgtgcgttcaactctcagagtttaacttttcttttcattcagcagtttggaaacactctgtttgtaaagtctgcacgtggatattttgaccacttagaggccttcgttggaaacgggtttttttcatgtaagggtagacagaagaattcccagtaacttccttgtgttgtgtgcattcaactcacagagttgaacgttcccttagacagagcagatttgaaacactctatttgtgcaatttacaagtgtagatttcaagcgctttaaggtcaacggcagaaaaggaaatatcttcgtttcaaaactagacagaatcattcccacaaactgcgttgtgatgtgttcgttcaactcacagagtttaacctttctgttcatagagcagttaggaaacactctgtttgtaaagtctgcaagtggatattcagacctcctagaggccttcgttggaaacgggatttcttcatattctgctagacagaagaattctcagtaacttcattgtgttgtgtgtattcaactcacagatttcaacgatcctttacacagagcagacttgaaacactctttttgtggaatttgcaattggagatttcagccgctttgaggtcaatggtagaataggaaatatcttcctatagaaactagacagaatgattctcataaactcctttgtgatgtgtgcgttgaactcacagagtttaacctttcttttcatacagcagttaggaaacactctgtctataaagtctgcaagtggatattcagacccctttgaggccttcgttggaaacgggatttcttcatattatgctagacagaagaattctcactaacttccttgtgttgtgtgtattcaactgacagagttgaactttcatttagagagagcagatttgaaacactgtttttgtggaatttgcaagtggagacttcaagcgctttggggccaaaggcagaaaaggaaatatcttcgtataaaaactagacagaatcattctcagaaactgctctgcgatgtgtgcgttcaactctcagagtttaacttttcttttcattcagcagtttggaaacactctgtttgtaaagtctgcacgtgcataatttgaccacttagaggccttcgttggaaacgggtttttttcatgtaaggctagacagaagaattctcagtaactaccttgtgttgtgtgtattcaactcacagagttgaacgatcctttacacagagcagacttgtaacactctttttgtggaatttgcaagtggagatttcagccgctttgaagtcaaaggtagaaaaggaaatatcttcctataaaaactagacagaatcattcccacaaactgctttgtgatgtgttcgttcaactcacagagtttaacctttcttttcatagagcagttaggaaacagctctgtttgtaaattctgtaagtggatattctgacatcttgtggccttcgttggaaacgggatttcttcatattctgctagacagaagaattctcagtaacttccttgtgttgtgtgtattcaactcacagagttgaacgatcctttacacagagcagacttgaaacactctttttgtggaatttgctagtggagatttcagccgctttgaggtcaatagtagaaaaggaaatatcttcgtagaaaaactagacagaatgattctcagaaacttcattgtgatgtgtgcgatcaactcacagagtttaacctttcttttcatagagcagttaggaaacactctgtttgtaaactctgcaagtggatattcagtcctctttgaggccttcgttggaaacgggatttcttcatactgtgctagacagagaattcccagtaacttccttgtgttgtgtgtgttcaactcacagagttgaactttcatttacacagagcagatttgaaacactctttttgtggaatttgcaagtggagatttcaagcgctttgaggccaaaggcagaaaaggaaatatcttcgtataaaaactagacagaatcattctcagaagctgctctgcgatgtgtgcgttcaactctcagagtttaacttttcttttcattcagcagtttggaaacactctgtttgtaaagtctgcacgtggatattttgaccacttagaggccttcgttggaaacgggtttttttcctgtaaggctagacagaagaattcccagtaacttccttgtgttgtgtacattcaactcacagagttgaacgttcccttagacagagcagatttgaaacactctttttgtgcaattggcaagtggagatttcaagcgctttgaggtcaatggcagaaaaggaaatatcttcgtttcaaaactagacagaatcattcccacaaactgcgttgtgatgtgttcgttcaactcacagagtttaaccttgcttttcatagagcagttaggaaacagtctgtttgtaaattctgtaagtggatattctgacatcttgtggccttccttggaaacgggatttcttcatattctgctagacagaagaattgtcagtaacttccttgtgttgtgtgtattcaactcacagagttgaacgatcctttacagagagcagacttgaaacactctttttgtggaatttgcaagtggagatttcagccgctttgaggtcaatagtagaaaaggaaatatcttcgtagaaaaactagacagaatgattctcagaaactcctttgtgatgtgtgcgttcaactcacagagtttaacctttcttttcatagagcagttaggaaacactccgtttgtaaagtctgcaagtggatattcagacctctttgaggccttcgttggaaacgggttttttccatataaggctagacagaagaattctcagtaacttccttgtgttgtgtgtattcaactgacagagttgaacgttcatttagagagagcagatttgaaacactgtttttgtggaatttgcaattggagatttcaagcgctttggggccaaaggcagaaaaggaaatatcttcgtataaaaactagacagaatcattctcagaaactgctctgtgatgtgtgcgttcaactctcagagtttaacttttcttttcattcagcactttggaaacactctgtttgtaaagtctgcacgtggatattttgaccacttagaggccttcgttggaaacgggtttttttcctgtaaggctagacagaagaattcccagtaacttccttgtgttgtgtgcattcaactcacagagatgaacgttcccttagacagagcagatttgaaacactctatttgtgcaatttgcaagtgtagatttcaagcgctttaaggtcaacggcagaaaaggaaatatcttcgtttcaaaactagacagaatgattctcagaaactcctttgtgatgtgtgcgttcaactcacagactttaacctttcttttcatagagcagttaggaaacactctgtttgtaaagtctgcaagtggatattcagacatccttgaggctttcgttggaaacgggatttcttcatattctgctagaaagatgaattctcagtaacttccttgtgttgtgtgtattcaactcacagagttgaacgatcctttacacagagcagatttgaaacactgtttttctggaatttgcaagtggagatttcagccgctttgaggtcaatggtagaaaaggaaatatctacgtataaaaactagacagaatgattctcagaaactcctttgtgatgtgtgcgttcaactcacagagttcaaactttcttttcatagagcagttgggaaacactctgtttgtaaagtctgcaagtggatattcagacttctttgaggccttcgttggaagcgggatttcttcatattatgctagacagaagaattcccagtaacttccttgtgttgtgtgtgttcaactcacagagttgaactttcatttacacagagcagatttgaaacactctttttgaggaatttgcaaatggagatttcaagcgctttgaggccaaaggcagaaaatgaaatatcgtcgtataaaaactagacagaatcattctcagaaactgctctgcgatgtgtgcgttcaactctcagagtttaacttttcttttcattcagcagtttggaaacactctgtttgtaaagtgtgcacgtggatattttgaccacttagaggccttcgttggaaacgggtttttttcctgtaaggctagacagaagaattcccagtaacttccttgtgttgtgtacattcaactcacagagttgaacgttcccttagacagagcagatttgaaacactctttttgtgcaattggcaagtggagatttcaagcgctttaaggtcaatggcagaaaaggaaatatcttcgtttcaaaactaggcagaatcattcccacaaactgcgttgtgatgtgttcgttcaactcacagagtttaacctttctgttcatagagcagttaggaaacactctgtaaagtctgtaagtggatattctgacatcttgtggccttcgttggaaacgggatttcttcatattctgctagacagaagaattctcagtaacttccttgtgttgtgtgtattcaactcacagagttgaactatcctttacacagagcagacttgtaacactctttttgtggaatttgcaagtggagatttcagccgctttgaagtcaaaggtagaaaaggaaatatcttcctataaaaactagacagaatgattctcagaaactcctttgtgatgtgtgcgttcaactcacagagtttaacttttcttttcatagagcagttgggaaacactctgtttgtaaagtctgcaagtggatattcagacctctttgaggccttcgttggaaacgggattttttcatattatgctagacagaagaattccgagtaacttccttgtgttgtgtgtgttcaactcacagagttgaactttcatttacacagagcagatttgaaacactctttttgtggaatttgcaagtggagatttcaagcgctttgaggccaaaggcagaaaaggaaatatactccgtttcaaaactagacagaatcattctcagaaaccgctctgtgatgtgtgcattcaactctcagagtttaacttttcttttcattcagcagtttggaaacactctgtttgtaaagtctgcacgtggatattttgaccacttagacgccttcttttgaaacgggttttttttcatgtaaggctagacagaagcaattcccagtaacttccttgtgttgtgtacattcaactcacagagttgaacgttaccttagacagagcagatttgaaacactctttttgtgcaattggcaaatggagatttcaagcgctttaaggtcaatggcagaaaaggaaatatcttcgtttcaaaactagacagaatcattcccacaaactgcgttgtgatgtgttcgttcaactcacagagtttaacctttcttttcatagagcagttaggaaacagtctgtttgtcaattctgtaagtggatattctgacatcttgtggccttctttggaaacgggatttcttcatattctgctagacagaagaattctcagtaacttccttgtgttgtgtgtattcaactcacagcaatttaacgatcctttacacagagcagacttgaaacactctttttgtggaatttgcaagtggagatttcagccgctttgtggtcaatgatagaaaaggaaatatcttcgtataaaaactagacagaatgattctcagaaactcctttgtgatgtgtgcgttcaactcacagagtttaacctttcttttcatagagcagttaggaaacactctgtttgtaaagtctgcaagtagatattcagacatctttgaggctttcgttggaaacgggatttcttcatattctgctagacagaagaattcccagtaacttccttgtgttgtgtgtgttcaacttcacagagttgaactttcatttacacagagcagatttgaaacactctttttgtggaatttgcaagtggagatttcaagcgctttgaggccaaaggcagaaaaggaaatatcttcgtttcaaaactagacagaatcattctcagaaactgctgcgtgatgtgtgcgttcaactctcagagtttaacttttcttttcattcagcggtttggaaacactgtgtttgtaaagtctgcacgtggatattttgaccacttacaggccttcgttggaaacgggtttttttcatgtaaggctagacagaagaattcccagtaacttccttgtgttgtgtacattcaactcacagagttgaacgttcccttagacagagcagatttgaaacactctttttgtgcaattggcaaatggagatttcaagcgctttaagttcaatggcagaaaaggaaatatcttcgtttcaaaactagacagaatgattctcagaaactcctttgtgatgtgtgcgttcaactcacagagtttaacctttcttttcatagagcagttaggaaacactctgtttgtgaagtctgcaagtggatattcagacctccttgaggccttcgttggaaacgggatttcttcatattctgctagacagaagaattctcagtaacttccttgtgttgtgtgtattcaactcacagagttgaacgatcctttacacagagcagacttgaaacactctttttgtggaatttgcaagtggagatttcagccgctgtgagttcaatggtagaataggaaatatcttcctatagaaagtagacagaatgattctcagaaactcctttgtgatgtgtgcgttcaactcacagagtttaacctttcttttcatagagcagttaggaaacactctgtttgtaaagtctgcaagtggatattctgacctccttgaggcgttcgttggaaaagggatttcttcatattctgctagacagaatcatactcagaaactgctctgcgatgtgtgcgttcaactctcagagtttaacttttcttttcattcagcagtttggaaacactctgtttgtgaagtctgcacgtggatattttgaccacttagtggccttcgttggaaacggttttttttcctgtaaggctagacagaagaattcccagtaacttccttgtgttgtgtacattcaactcacagagttgaacgttcccttagacagagcagatttgaaacactctttttgtgcaattggcaagtggtgatttcagccgctttgaggtcaatgatagaaaaggaaatatcttcgtataataactagacagaatgattctcagaaacttcattgtgatgtgtgcgttcaactcacagagtttaacctttcttttcatagagcagttaggaaacactctgtctgtaaagtctgcaagtggatattcagacctctttgaggccttcgttggaaacgggtttttttcatataaggctagacagaagaattctcagtaacttccttgttttgtgtgaattcacctcacagatttgaacgatcctttacacagagcagacttgaaacactctttttgtggaatttggaagtggagatttcagccgctttgtggtcaatagtagaataggaaatatcttcctatagaaactagacagaatgattctcagaaactcctttgtgatgtgtgcgttcaactcacagagtttaacctttcttttcatagagcagttaggaaacactctgtttttaaagtctgcaagtgtatattcagacatccttgaggctttcgttgcaaacgggatttcttcatattctgctagaaagaagaattctcagaaacttccctgtgttgtgtgaattcaactcacagagttgaacgatcctttacacagagcagacttgaaacactctttttgtggaatttgcaagtagagatttcagccgctttgaggtcaatggtagaatagggaatatcttcctatagaaactagacagaatgattctcagaatctcctttgtgatgtgtgcgttcaactcacagagtttaacctttcttttcatagagcagttgggaaacactctgtttgtaaagtctgcaagtggatattcagacatccttgaggctttcgttggaaacgggatttcttcatattctgctagaaagaagaattttcagaaacttccttgtgttgtgtgtattcaactcacagagttgaacgatcatttacacagagcagacttgagacactctttttgtggaatttgtaagtggagatttcagccgctttgaggtcaatggtagaaaaggaaatatcttcgtataaaaactagacagaatgattctcagaaactcctttgtgatgtgtgcgttcaactcacagagtttaacctttcttttcatagagcagttaggaaacactctgtttgcaaagtctgcaagtggatattcagacctctttgaggccttcgttggaaacggttttttttcatataaggctagacagaagaattctcagtaacttccttgtgttgtgtgtattcaactgacagatttgaactttcatttagagagagcagatttgaaacactgtttttgtggaatttgcaagtggagatttcaagcgctttggggccaaaggcagaaaaggaaatatcttcgtataaaaactagacagaatcattctcagaaactgctctgcgatgtgtgcgttcaactctcagagtttaacttttcttttcattcagcagtttggaaacactctgtttgcaaagtctgcacgtggatattttgaccacttagaggccttcgttggaaacgggtttttttcatgtaaggctagacagaagaattcccagtaacttccttgtgttgtgtacattcaactcacagagttgaacgttcccttagacaggagcagatttgaaacactctttttgtgcaattggcaagtggtgatttcagccgctttgaggtcaatggtagaaaaggaaatatcttcgtataaaaactagacagaatgattctgagaaactcctttgtgatgtgtgcgttcaactcacagagttcaacctttcttttcatagagcagttgggaaacactctgtttgtaaattctgcaaatgcatattcagacttctttgaggccttcgttggaagcgggatttcttcatattctgctagacagaagaattctcagaaacttcgatgtgttgtgtgttttcaaatcacagagttcaacgatcctttacacagagtagacttgaaacactctttttgtggaattggcagggtggagatttcagccgctttgaggtcaatggtagaaaaggaaatatcttcgtataaaaactagacagaatgattctcagaaacttctttgtgatgtgtgcgttcaactcacagagtttaacctttcttttcatagagcagttaggaaacactctgtttgtaaagtctgcaagtggatattcagacctctttgaggccttcgttggaaacgggtttttttcatataaggctagacagaagaattcccagtaacttccttgtgttgtgtgtgttcaactcacagcagttgaactttcatttacacagagcagatttgaaacactctttttgtggaatttgcaagtggagatttcaagcgctttgaggccaaaggcagaaaaggaaatatcttcgtataaaaactagacagaatcattctcagaaactgctctgcgatgtgtgcgttcaactctcagagtttaagttttcttttcattcagcagtttggaaacactctgtttgtaaagtctgcacgtggatattttgaccacttagaggccttcgttggaaacgggtttctttcctgtaaggctagacagaagaattcccagtaacttccttgtgttgtgtgcattcaactcacagagttgaacgttcccttagacagagcagatttgaaacagcctatttgtgcaatttgcaagtgtagatttcaagcgctttaaggtcaacggctgaaaaggaaatatcttcgtttcaaaactagacagaaatcattcccacaaactgcgttgtgatgtgttcgttcaactcacagagtttaacctttctgttcatagagcagttaggaaacactctgtttgtaaagtctgcaagtggatattcagacctccttgaggccttcgttggaaacgggatttcttcatattctgctagacagaataattctcagtaacttccttgtgttgtgtgtattcaactcacagagttgaaggatcctttacagagagctggcttgcaacactctttttgtcgaatttgcaagtggagatttcagccgctttgaggtcaatggtagaataggaaatatcttcttatagaaactagacagaatgattctcagaaactcctttgtgatgtgtgtgttcaactcacagagtttaacctttcttttcctagagcagttagtaaacactctgtttataaagtctgcaagtggatattcagacccctttgaggccttcgttggaaacgggatttcttcatattattctagacagaagaattctcagtaacttccttgtgttgtgtgtattcaactcacagagttgaactttcatttagagagagcagatttgaaacactgtttttgtggaatttgcaagtggtgacttcaagcgctttggggccaaacgcagaaaaggaaatatcttcgtataaaaactagacagaaatcattctcataaactgctgcgtgatgtgtgcgttcaactctcagagtttaacttttcttttcattcagcggtttggaaacactctgtttgtaaagtttgcacgtggatattttgaccacttagaggccttcgttggaaacgggtttttttcatgtaaggctagacagaagaattcccaggaacttccttgtgttgtgtacattcaactcacagagttgaacgttcccttagacagagcagatttgaaacactctttttgtgcaattggcaaatggagatttcaagcgctttaaggtcaatggcagaaaaggaaatatcttcgtttcaaaactatacagaatcattcccacaaactgcgttgtgatgtgtgcgttcaactcaaagagtttaacctttcttttcatagagcagttaggaaacactctgtttgtaaagtctgcaagtggatattcagacctccttgaagccttcgttggaaacgggatttcttcatattctgctagacagaagaattctcagaaacttccttctgttgtgtgtattcaactcacagagttgaacgatcgtttacacagagcagacttgagacactctttttgtggaatttgtaagtggagatttcagccgctttgaggtcaatggtagaaaaggaaatatcttcatataaaaactagacagaatgattctcagaaactcctttgtgatgtgtgcgttcaactcacagagttcaacctttcttttcatagagcagttgggaaacactctgtttgtaaagtctgcaagtggatattcagacttctttgaggccttcgttggaagcgggatttcttcatgttcagctagacagaagaattctcagaaacttccttgtgttgtgtgtattcaactcacagagttgaacgatcctttacacagagcagacttgaaacactccttttgtggaatttgcaagtggagatttcagccgctttgaggtcaatggtagaataggaaatatcttcctatagaaactagacagaatcattctcagaaactgctctgcgatgtgtgcgttcaactctcagtgtttaacttttcttttcattcagcagtttggaaacactctgtttgtaaagtctgcacgtggataacttgaccacttagaggcctttgttggaaacgggtttttttcatgtaaggctagacagaagaattctcagtaacttccttgtgttgtgtgtattcaactcacagagttgaacgatcctttacacagagcagacttttaacactctttttgtggaatttgcaagtggagatttcagccactttgaagtcaaaggtagaaaaggaaataacttcctataaaaactagacagaatgattctcagaaactcctttgtgatgtgtgcgttcaactcacagagtttcacctttcttttcatagagcagataggaaacactctgtttgtaaagtctgcaagtggatattcagacatccttgaggctttcgttggaaacgggatttcttcatattctgctagaaagaagaattctcagtaacttccttgtgttgtgtgtattcaactcacagagttgaacgatcctttacactcagcagacttgaaacactctttttgtggaatttgcaagtggagatttcagccgctttgaggtcaatggtagaataggaaatatcttcctatagaaactagacagaatgattctcagaaactcctttgtgatgtgtgtgttcaactcacagagtttaacctttcttttcatagagcagttaggaaacactctgtttgtaaagtctgcaagtggatattcagacctctttgaggccttcgttggaaacgcgtttttttcatataaggctagacagaagaattcccagtaacttccttgtgttgtgtgtgttcaagtcacagagttgaactttcctttacacagagaagatttgaaacactctttttgtggaatttgcaagtggagatttcaagcgctttgaggccaaaggcagaaaaggaaatatcttcgtttcaaaactagacagaatcattctcagaaactgctgcgtgatgtgtgcgttcaactctcagagtttaacttttcttttcattcagcggtttggaaacactctgtttgtaaagtctgcacgtggacactttgaccacttagaggccttctttggaaacgggttttttttatttaaggctagacagaagaattcccagtaacttccttgtgttgtgtgcattcaactcacagagttgaacgttcccttagacagagcagatttgaaacactctatttgtgcaatttgcaagtgtagatttcaagcgctttaaggtcaatggcagaaaaggaaatattttcgtttcaaaactagacagaatcattctcagaaactcctttgtgatgtgtgcgtttaactcacagagtttaacctttcttttcatagagcagttaggaaacactctgtttgtaaagtctgcaagtggatattcagacctctttgaggccttcgttggaaacgggatttcttcatattctgctagacagaagaattcttagtaacttccttgggttgtgtgtattcaactcacagagtggaacgatcctttacacagagcagacttgaaacactctttttgtggaatttgcaagtggagatttcagccgctttgaggtcaatggtagaaaaggaaatatcttcgtataaaaactagacagataatgattctcagaaagtcctttgtgatgtgtgtgttcaaatcacagagtttaacctttcttttcatagagcagttagtaaacactctgtttataaagtctgcaagtggataatcagacccctttgaggccttcgttggaaacgggatttcctcatattatgctagacagaagaattcccagtaacttccttgtgttgtgtgtgttcaactcacagagttgaactttcatttacacagagcagattggaaacactctttttgtggaatttgcaagtggagatttcaagcgctttgaggccaaaggcagaaaaggaaatatcttcatataaaaactagacagaatcattctcagaaactgctctgcgatgtgtgcgatcaactctcagagtttaacttttcttttcattcagcagtttggaaacactctgtttgtaaagtctgcacgtggatattttgaccacttagaggccttcgttggaaacgggtttctttcctgtaaggctagacagaagaattcacagtaagttccttgtgttgtgtgcattcacctcacagggttgaaggttcctttagacagagcagattggaaacactctttttgtgcaatttgcaagtggagatttcaagcgctttaaggtcaatggcagaaaaggaaatatcttcgtttcaaaactagacagaatcattcccacaaactgcgttgtgatgtgtgagttcaagtcaaagagtttaacctttcttttcatagagcagttaggaaacactctgtttgtaaagtctgcaagtggatattcagacctccttgaggccttcgttggaaacgggatttcttcatattctgctagacagaagaattctcagtaacttccttgtgttgtgtgtattcaactcacagagttgaacgatcctttacacagagcagacttgaaacactctttttgtggagtttgcaagtggagatttcagccgctttgaggtcaatagtagaaaaggaaatatcttcgtagaaaaactagacagaatgattctcagaaactccttagtgatgtgtgtgtccaactcacagggtttaacctttcttttcatagagcagttagcaaacactctgtttgtaaagtctgcaagaggatattcagacctctttgaggccttcgttggaaacgggtttttttcatataaggctagacagaagaattcccagtaacttccttgtgttgtgtgtgttcaactcacacagttgaactttcatttacagagagcagatttgaaacactctttttgtggaatttgcaaatggagatttcaagcgctttgaggccaaaggcagaaaaggaaatatcttcgtataaaaactagacagaatcattctcagaaactgctgcgtgatgtgtgcgttcaactctcagagtttaacttttcttttcattcagcggtttggaaacacactgtttgtaaagtctgcacgtggatattttgaccacttagaggccttcgttggaaacgggattttttcatgtaaggctagacagaagaattcccagtaatttccttgtgttgtgtgcattcagctcacagagttgaacgttcccttagacagagcagatttgaaacactctatttgtgcaatttgcaagtgtagatttcaagcgctttaaggtcaatggcagaaaaggaaatatcttcgtttcaaaactagacagaatcattcccacaaactgcgttgtgatgtgttcgttcaactcacagagtttaacctttctgttcatagagcagttaggaaacactctgtttgtaaagtctgcaagtggatattcagacctctttgaggccttcgttggaaacgggatttcttcatatgatgctagacagaagaattctcagtaacttccttgtgttgtgtgtattcaacttacagagttgaccgatcctttacacagagcagacttgtaacactctttttgtggaatttgcaagtggagatttcagccgctttgaagtcaaaggtagaaaaggaaatatcttcctataaaaactagacagaatgattctcagaaactcctttgtgatgtgtgtgttcaactcacagagtttaacctttcttttcatagagcagttaggaaacactctgtttctaaagtctgcaagtggatattcagacctctttgaggtcttcgttggaaacgggtttttttcatataaggctagacagaagaattcccagtaacttccttgtgttgtgtgtgttcaactcacagtgttgaactttcatttacacagagcagatttgaaacactctttttgtggaatttgcaagtggagatttcaagcgctgtgaggccaaaggcagaaaaggaaatatcttcgtataaaaactagacagaatcattctcagaaactgctctgcgatgtgtgcgttcaactctcagagtttaactttgcttttcattcagcagtttggaaacactctgtttctaaagtctgcacgtggataatttgaccacttagaggccttcgttggaaacgggtttttttcctgtaaggctagacagaagaattcccagtaacttccttgtgttgtgtgcattcaactcacagagttgaacgttcccttagacagagcagatttgaaacactctatttgtgcaatttgcaagtgtatatttcaagcgctttaaggtcaaaggcagaaaaggaaatatcttcgtttcaaaactagacagaatcattcccacaaactgcgttgtgatgtgttcgttcaactcacagagtttaacctttctgttcatagagcagttaggaaacactctgtttgtaaagtatgcaagtggatattcagacctccttgaggccttcattggaaacgggatttcttcatattctgctagactgaagaattctcagtaacttccttgtgttgtgtgtattcaactcacagagttgaacgatcctttacacagagcagacttgaaacactctttttgtggaatttgcaagtggagatttcagccgctttgaggtcaatagtagaaaaagaaatatcttcgtagaaaaactagacagaatgattctcagaaactcctttgtgatgtgtgcgttcaactcacagagtttaacctttctgttcatagagcagttaggaaacactctgtttgtaaagtctgcaagtggatattcagacctccttgaggccttcgttggaaacggtatttcttcatattctgctagacagaagaattctcagtcacttccttgtgttgtgtgtattcaactgacagagttgaactttcatttagagagagcagatttgaatcactgtttttgtggaatttgcaagtggagatttcaagcgctttggggccaaaggcagaaaaggatatatcttcgtataaaaactggacagaatcattctcagaaactgctctgcgatgtgtgcgttcaactctcagagtttaacttttcttttcattcagcagtttggaaacactctgtttgtaaagtctgcacgtggataacttgaccacttagaggccttcgttggaaacgggtttttttcatgtaaggctatacagaagaattcccagtaacttccttgtgttgtgtacattcaactcacagagttgaacgttcccttagacagagcagatttgaaacactctttttgtgcaattggcaaatggagatttcaagcgctttaagttcaaaggcagaaaaggaaatatcttcgtttcaaaactagacagaatcattcccacaaactgcgttgtgatgtgttcgttcaactcacagagtttaacctttctgttcatagagcagttaggaaacactctgtttgtaaagtctgtaagtggatattcagacatcttgtggccttcgttggaaacgggatttcttcatattctgctagacagaagaattctcagtaacttccttgtgttgtgtgtattcatcttacagagttgaacgatcctttacacagagcagacttgtaaaactctttttgtggaatttgcaagtggagatttcagccgctttgaagtcaaaggtagaaaaggaaatatcttcctataaaaactagacagaacgattctcagaaactcctttgtgatgtgtgcgttcaactcacagagtttaacctttcttttcatagagcagttaggaaacagtctgtttgtaaagtctgcaagtggatattcagacccctttgaggccttcgttggaaacgggatttcttcctattctgctagacagaagaattcccagtaacttccttgtgttgtgtgtgttcaactcacagagttgaactttcatttacacagagcagatttgaaacactctttttgtggaatttgcaaatggagatttcaagcgctttgcggccaaaggcagaaaaggaaatatcttcgtataaaaactagacagaatcattctcagaaactgctctgcgatgtgtgcgttcaactctcagagtttaacttttcttttcattcagcagtttggaaacactcggtttgtaaagtctgcacgtggatattttgaccacttagaggccttcgttggaaacgggtttttttcctgtaaggctagacagaagaattctcagtaacttccttgtgttgtgtgtattcaactcacagagttgaacgatcctttacacagagcagacttgtaacactctttttgtggaatttgaaagtggagatttcagccgctttgaagtcaaaggtagaaaaggaaatatcttcctataaaaactagacagaatgattctcagaaactcctttgtgatgtgtgcgttcaactcacagagtttaacttttcttttcatagagcagttaggaaacactcagtttgtaaagtctgcaagtggatattcagacctccttgaggccttcgttggaaaagggatttcctcatattatgctagacagaagaattctcagtaacttccttgtgttgtgtgtattcaactcacagagttgaacgatccttacagagagcagacttgaaacactctttttgtggaatttgcaagtggagatttcatccgctttgaggtcaatggtagaataggaaatatcttcctatagaaactagacagaatgattctcagaaactcctttgtgatgtgtgtgttcaactcacagagtttaacctttcttttcatagagcagttaggaaacactctgtttgtaaagtctgcaagtggatattcagacctctttgaggccttcgttggaaacgggtttttttcatataaggctacacagaagaattcccagtaacttccttgtgttgtgtgtgttcaactcacagagttgaactttcatttacacagagcagatttgaaacactctttttgtggaatttgcaagtggagatttcaagcgctttgaggccaaaggcagaaaaggaaatatcttcgtataaaaattagacagaatcattctcagaaactgctctgcgatgtgtgcgttcaactctcagagtttaacttttcttttcattcagcagtttggaaacactctggttgtaaagtctgcacgtggataacttgaccacttagaggccttcgttggaaacgggtttttttcctgtaaggctagacagaagaattcccaggaacttccttgtgttgtgtacattcaactcacagagttgaacgttcccttagacagagcagatttgaaacactctttttgtacaattggcaagtggtgatttcagccgctttgaggtcaatggtagaaaaggaaatatcttcgtataaaaactagacagaatgattctcagaaacttcattgtgacgtgtgcgttcaactcacagagtttaacctttcttttcatagagcagttaggaaacaccctgtttgtaaagtctgcaagtggatattcagacctctttgaggccttcgttggaaacgggatttcttcatactgtgctagacagaagaattctcagtaacttccttgtgttgtgtgtattcaactcacagagttgaacgatcctttacacagagcagattacaaacactctttttgtggaatttgcaagtggagatttcagccgctttgaggtcaatagtagaaaaggaaatatcttcgtataaaaactagacagaatgattctcagaaacggctttgtgatgtgtgtgttcaactcacagagtttaaccttccttttcatagagcagttagtaaacactctgtttataaagtctgcaagtggatattcagacccctttgaggccttcgttggaaacgggatttcttcatattatgctagacagaagaattcccagtaacttccttgtgttgtgtgtgttcaacccacagagttgaactttcatttacacagagcagatttgaaacactctttttgtggaatttgcaagtggagatgtcaagcgctttgaggccaaaggcagaaaaggaaatatcttcgtttcaaaactagacagaatcattctcagaaactgctctgcgatgtgtgcgttcaactctcagagtttaacttttcttttcattcagcagtttggaaacattctgtttgtaaagtctgcacgtggatattttgaccacttagaggccttcgttggaaacgggtttttttcctgtaaggctagacagaagaattcccagtaacttccttgtgttgtgtacattcaactcacagagttgaacgttcccttagacagagcagatttgaaacactctttttgtgcaattggcaagtggagatttcaagcgctttaaggtcaatggcagaaaaggaaatatcttcgtttgaaaactagacagaatcattcccacaaactgcgttgtgatgtgttcgttcaactcacagagtttaacctttcttttcatagagcagttaggaaacagtctgtttgtcaattctgtaagtggatattctgacatcttgtggcattcgttggaaacgggatttcttcatattactgctagacagaagaattctcagtaacttccttgtgttgtgtgtattcaactcacagagttgaacgatcctttacacagagcagacttgaaacactctttttgtggtatttgcaagtggagatttcagccgctttgaggtcaatggtagaataggaaatatcttcctatagaaactagacagaatgattctcagaaactcctttgtgatgtgtgtgttcaactcacagagttcaacctttcttttaatagagcagttgggaaacactctgtttgtaaagtctgcaagtggatattcagacttctttgaggccttcgttggaaacgggatttcttcatattatgctagacagaagaattctcagtaacttccttgtgttgtgtgtattcaactgacagagttgaactttcatttagagagagcagatttgaaacactgtttttgtggaatttgcaagtggagatttcaagcgctttggggccaaaagcagaaaaggaaatatcttcgtataaaaactagacagaatcattctcagaaactgctctgcgatgtgtgcgttcaactctcagagtttaacttttcttttcattcagcagtttggaaacactctgtttgtaaagtctgcacgtggatattttgacaacttagaggccttcgttggaaacgggtttttttcctgtaaggctagacagaagaattcccagtaaattccttgtgttgtgtgcattcaactcacagagttgaacgttcccttagacagagcagatttgaaacactctatttgtgcaatttgcaagtgtagatttcaagcgctttaaggtcaatggcagaaaaggaaatatcttcgattcaaaactagacagaatcattccctcaaactgcgttgtgatgtgttcgttcaactcacagagtttaacctttcttttcatagagcagttaggaaacagtctgtttgtaaattctgtaagtggatattctgacatcttgtggccttcgttggaaacgggatttcttcatattctgctagacagaagaattctcagtaacttccttgtgttgtgtgtattcaactcacagacttgaacgatcctttacacagagcagacttgtaacactctttttgtggaatttgcaagtggagatttcagccgctttgaagtcaaaggtagaaaaggaaatatcttcctataaaaactagacagaatgattctcagaaactcctttgtgatgtgtgcgttcaactcacagagtttatcttttcttttcatagagcagttaggaaacactctgtttgtaaagtctgcaagtggatattcagacctctttgaggccttcgttggaaacgggatttcttcatattctgctagacagaagaattcccagtaacttccttgtgttgtgtgtgttcaactcacagagttgaactctcatttacacagagcagatttgaaacactctttttgtggaatttgcaagtggagatttcaagcgctttgaggccaaaggcagaaaaggaaatatcttcgtataaaaactagacagaatcattctcagaaaccgctctgtgatgtgtgcgttcaactctcagagtttaacttttcttttcattcagcagtttggaaacactctgtttgtaaagtctccacgtggatattttgaccacttagaagccttcgttggaaacgtgtttttttttcatgtaaggctagacagaagaattcccaggaacttccttgcgttgtgtacattcaactcacagagttgaacgttcccttagacagagcagatttgaaacactctttttgtgcaattggcaagtggagatttcaagcgctttaaggtcaattgcagaaaaggaaatatcttcgtttcaaaactagacagaatgattctcagaaacttctttgtgatgtgtgcgttcaactcacagagtttaacctttcttttcatagagcagttaggaaacactctgtttgtaaactctgcaagtggatattcagacgtctttgaggccttcgttggaaacgggatttcttcatactgtgctagacagaagaattctcagtaacttcattgtgttgtgtgtattcaactcacagatttcaacgatcctttacacagagcagacttgaaacactctttttctggaatttgcaattggagatttcagccgctttgaggtcaatggtagaataggaaatatcttcctatagaaactagacagaatgattctcagaaactcctttgtgatgtgtgtgttcaactcacagattttaacctttcttttcatagagcagttagtaaacactctgtttataaagtctgcaagtggatattcagacccctttgaggccttcgttggaaacgggatttcttcatattctgctagacagaagaattctcagtaacttccttgtgttgtgtgtagtcaactcacagagttgaacgatcctttacagagagcagacttgaaacactctttttgtggaatttgcaagtggagatttcagccgctttgaggtcaatggaagaaaaggaaactatcttcgtataaagactagacagaatcattctcagaaactgctctgcgatgtgtgcgttcaactctcagagtttaacctttcttttcattcagcagttgggaaacactctgtttgtaaagtctgcacgtggataacttgaccacttagaggccttcgttggaaacgggtttttttcatgtaaggctagacagaagaattctcagtaacttccttgtgttgtgtgtattcaactcacagagttgaacgatcctttacacagagcagacttgtaacactctttttgtggaatttgcaagtggagatttcagccgctttgaagtcaaagttagaaaaggaaataacttcctataaaaactagacagaatcattcccacaaactgcgttgtgatgtgttcgttcaactcacagagtttaacctttcttttcatagagcagttaggaaacagtctgtttgtcaattctgtaagtggatattctgacatcttgtggccttcgttggaaacgggatttcttcatattctgctagacggaagaattctcagaatctttccttgtgttgtgtgtattcaactcacagaattgaacgatcctttacacagagcagacttgaaacactctttttgtggaatttgcaagtggagatttcagccgctttgaggtccatggtagaaaaggaaatatcttcgtataaaaactagacagaatgattctcagaaactcctttgtgatgtgtgcgttcaactcacagtttaacctttcttttcatagagcagttaggaaacactctgtttgtaaagtctgcaagtggatattcagacatctttgaggctttcgttggaaacggaatttcttcatattctgctagacagaagaattctcagtaacttccttgtgttgtgtgtattcaactgacagagttgaactttcatttagagagagcagatttgaaacactgtttttgtggaatttggaagtggagatttcaaacgctttggggccaaaggcagaaaagaaaatatattcgtataaaaactagacggaatcattctcagaaactgctgcgtgatgtgtgcgttcaactctcagagtttaacttttcttttcattcagcggtttggaaacactctgtttgtaaagtctgcacgtggatattttgaccacttagaggccttcgttggaaccgggttttttgcatgtaaggctagacagaagaattcccaggaacttccttgtgttgtgtacattcaactcacagagttgaacgttcccttagacagagtagatttgaaacactctttttgtgcaattggcaagtggtgatttcagccgctttgaggtcaatggtagaaaaggaaatatcttcgtataaaaactagacagaatcattcccacaaactgcgctgtgatgtgttcgttcatctcacagagtttaacctttcttttcatagagcagttaggaaacactctgtttgtaaattctgtaagtggatattctgacatcttgtggccttcgttggaaacgggatttcttcatattctgctagacagaagaattctcagaaacttccttgtgttgtgtgttttcaactcacagagttgaaccgatcctttacacagagcagacttgaaacactccttttgtggaatttgcaagtggagatttcagccgctttgaggtcaatggtagaataggaaatatcttcctatagaaagtagacagaatgattctcagaaactcctttgtgatgagtgcgttcaactcacagagtttaacctttcttttcatagagcagttaggaaacactctgtttttaaagtctgcacgtggatattttgacctctttgaggccttccttggaaacgggattttttcatataaggctagacagaagaattctcagtaacttccttgtgttgtgtgtattcaactgacagagttgaactttcatttagaccgagcagatttgaaacactatttatgtggaattggcaattggagatttcaagctctttgaggccaaaggcagaaaaggaaatatcttcgtttcaaaactagacagaatcattctcagaaactgctctgcgatgtgtgcgttgaactctcagagtttaacttttcttttcattcagcagtttggaaacactctgtttgtaaagtctgcacgtggatattttgaccacttagaggccttcgttggaaacgggtttttttcctgtaaggctagacagaagaattcccagtaacttccttgtgttgtgtgcattcaactcacagagttgaacgttcccttagacagagcagatttgaaacactctatttgtgcaatttgcaagtgtagatttcaagcgctttatggtcaacggcagaaaaggaaatatcttcgtttcaaaactagacagaatcattcccacaaactgcgttgtgatgtgttcgttcaactcacagagtttaacctttctgttcatagaacagttaggaaacactctgtaaagtctgtaagtggatattctgacatcttgtggccttcgttggaaacgggatttcttcatattctgctagacagaagaattctcagtaacttccttgggttgtgtgtattcaactcaccgagttgaaggatcctttacagagagcaggcttgaaacactctttttgtcgaatttgcaagtggagatttcagccgctttgaggtcaatggtagaataggaaatatcttcatataaagactagacagaatgattctcagaaactcctttgtgatgtgtgcgttcaactcacagagtttaacttttcttttcatagagcagttaggaaacactctgtttgtaaagtctgcaagtggatattccgacctctttgaggccttcgttggaaacgggatttcttcatattatgctggacagaagaattctcagtaacttccttgtgttgtgtgtattcaactgacagagttgaactttcatttagagagagcacatttgaaacactgtttttgtggaatttgcaagtggagatttcaagcgctttggggccaaaggcagaaaaggaaatatcttcgtataaaaactagacagaatcattctcagaaactgctgcgtgatgtgtgcgttcaactctcagagtttaacttttcttttcattcagcggtttggaaacactgtgtttgtaaagtctgcacgtggatattttgaccacttagaggccttcgttggaaacgggtttttttcatgtaaggctagacagaagaattcccagtaacttccttgtgttgtgtgcattccactcacagagttgaacgttcccttagacagagcagatttgaaacactctatttgtgcaatttgcaagtgtagatttcaagcgctttaaggtcaatggcagaaaaggaaatatcttcgtttcaaaactagacagaatcattcccacaaactgcgttgtgatgtgttcgttcaagtcacagagtttaacctttcttttcatagagcagttaggaaacagtctgtttgtcaattctgtaagtggatattctgacatcttgtggccttcgttggaaacgggatttcttcatattctgctagacagaagaattctcagtaacttccttgtgttgtgtgaattcaactcacagagttgaacgatcctttacacagagcagacttgaaacactgtttttgtggaatttgccagtggagatttcagccgctttgaggtcaatggtagaataggaaatatcttcctatagaaactagacagaatgattctcagaaactcctttgtgatgtgtgcgttcaactcacagagtttaaccttttttttcatagagcagttaggaaacactctgtttgtaaagtctgcaagtggatattcagacctctttgaggccttcgttggaaacgggttttttacatataaggctaaacagaagaattcccagtaacttccttgtgttgtgtgtgttcaactcacagagttgaactttcatttacccagagcagatttgaaacactctttttgtggaatttgcaagtggagatttcaagcgctttgaggctaaaggcagaaaaggaaatatcttcgtttcaaaactagacagaatcattctcagaaactgctctgcgatgtgtgcgttcaactctcagagtttaacttttcttttcattcagcagtttggaaacactctgtttgtaaagtctgcacgtggatattttgatagaggctttcgttggaaacgggtttttttcttgtaaggctagaaagaagaattcccagtaacttccttgtgttgtgtgcattcaactcacagagttgaacgttcccttagacagagcagatttgaaacactctatttgtccaatttgcaagtgtagatttcaagcgctttaaggtcaacggcagaaaaggaaatatcttcgtttcaaaactagacagaatgattctcagaaactcctttgtgatgtgtgcgttcaactcacagagtttaacctttcttttcatagagcagttaggaaacactctgtttgtaaagtctgcaagtggatattcacacctccttgaggccttcgttggaaacgggatttcttcacattctgctagacagaagaattctcagtaacttccttgtgttgtgtgtattcaactcactgagttgaacgatcctttacacagagcagacttgaaacactctttttgtggaatttgcaagtggagatttcagccgctttgaggtcaatggtagaaaaggaaactattttcgtataaagactagacagaatgattctcagaaactcctttgtgatgtgtgcgttcaactcacagagtttaacctttcttttcatagagcagttaggaaacactctgtttgtaaagtctgcacgtggatatttggacttctttgaggccttcgttggaaacggggtattttcatgtaaggctagacagaagaattcccagtaacttccttgtgttttgtgtgttcaactcacagagttgaactttcatttacacagagcagatttgaaacactctttttgtggaatttgcaaatggagatttcaagcgctttgaggccaaaggcagaaaaggaaatatcttcgtataaaaactagacagaatcattcccagaaactgctctgcgatgtgtgcgttcaactctcagagtttaacttttcttttcattcagcagtttggaaacactctgtttgtaaagtctgcacgtggatattttgaccatttagaggccttcgttggaaacgggtttttttcttgtaaggctagacagaagaattcccagtaacttccttgtgttgtgtacattcaactcacagagttgaacgttcccttagacagagcagatttgaaacactctttttgtgcaattggcaagtggagatttcaagcgctttgaggtcaatggcagaaaaggaaatatcttcgtttcaaaactagacagaatcattcccacaaactgcgttgtgatgtgttcgttcaactcacagagtttaacctttctgttcatagagcagttaggaaacactctgtttgtaaagtctgtaagtggatattctgacatcttgtggccttcgttggaaacgggatttcttcatattctgctagagagaagaatactcagtaacatccgcgtgttgtgtgtattcaactcagagagttgaacgatcctttacacagagcagacttgaaacactctttttgtggaatttgcaagtggagatttcagccgctttgaagtcaatggtagaaaaggaaatatcttcctataaaaactagacagaatgattctcagaaacttcattgtgatgtgtgcgttcaactcacagagtttaacctttcttttcatagaacagttaggaaacactctgtttgtaaactctgcaagtggatattcagacctctttgaggccttcgttggaaacgggttttttcatgtaaggctagacagaagaattctcagtaacttccttgtgttgtgtgtattcaactcacagagttgaatgatcctttacacagaacagtcttgaaacactctttttgtggaatttgcaagtggagatttcagccgctttgaggtcaatggtggaataggaaatatcttcctatagaaattagacagaatgattctcagaaactcctttgtgatgtgtgtgttcaactcacagagtttaacctttcttttcatagagcagttaggaaacactctgtttgtaaagtctgcaagtggatattcagacctctttgaggccttcgttggaaacgggatttcttcatattatgctagacagaagaattcccagtaacttccttgtgttgtgtgtgttcaactcacagagttgaactttcatttacacagagcagatttgaaacactctttttgtggaatttgcaagtggagatttcaagcgctttgaggccaaaggcagaaaaggaaatatcttcgtataaaaactggacagaatcattctcagaaactgctgcgtgatgtgtgcgttcaactctcagagtttaacttttcttttcattcagcggtttggaaacactctgtttgtaaagtctgcacgtggaaattttgaccacttagaggccttcgttggaaacgggtttttttcatataaggctagacagaagaattcccagtaacttccttgtgttgtgtgcattcaactcacagagttgaacgttcccttagacagagcagatttgaaacactctatttgtccaatttgcaagtgtagatttcaagcgctttaaggtcaacggcagaaaaggaaatatcttcgtttcaaaactagacagaatgattctcagaaaatcttttgtgatgtgtgcgttcaactcacagagtttaacttttcttctcatagagcagttaggaaacactctgtttgtaaagtctgcaagtggatatgcatacctctttgaggccttcgttggaaacgggatttcttcatattctgctagacagaagaattctcagtaacttccttgtgttgtgtgtattcaactcacagagttgaaggatcctttacagagagcaggcttgaaacactctttttgtcgaatttgcaaatggagatttcagccgctttgaggtcaatggtagaagaggaaatatcttcttatagaaactagacagaatgattctcagaaacttctttgtgatgtgtgcgttcaactcacagagtttaacctttcttttcatagagcagttaggaaacactgtgtttttaaactgtgcaagtggatattgagacctctttgaggccttctttggaaacgggatttcttcatactgtgctagacagaagaattcccagtaacttccatgtgttgtgtgtgttcaactcacagagttgaactttcatttacacagagcagatttgaaacactctttttgtggaatttgcaaatggagatttcaagcgctttgaggccaaaggcagaaagggaaatatcttcgtctaaaaactagacagaatcattctcagaaactgctctgcgatgtgtgcgttcaactctcagagtttaacttatcttttcattcagcagtttggaaacactctgtttgtaaagtctgcacgtggataatttgaccacttagaggtcttcgttggaaacgggtttttatcatgtaaggctagacagaagaattctcagtaacttccttgtgttgtgtgtattcaactgacagagttgaactttcatttagacagagcagatttgaaaaactctttatgtggaatttgcaagtggagatttcaagcgctttgaggccaaagacagaaaaggaaatatcttcgtataaaaactagacagaatcattccctcaaactgcgttgtgatgtgttcgatcaactcacggagtttaacctttcttttcatagagcagttaggaaacactctgtttgtaaactctgcaagtggatattcagacctctttgaggacttcgttggaaacgggatttcttcatattatgctagacagaagaattctcagtaacttctttgtgttgtgtgtattcaactcacagagtttaccgatcctttacacagagctgacctgaaacactctttttgtcgaatttgcaagtggagatttcagccgctttgaggtcaatggtagaataggaaatatcttcctatggaaattcgacagaatgattctcagaaaatcttttgtgatgtgtgcgttcaactcacagagtttaacttttcttctcatagagcagttaggaaacactctgtttgtaaagtctgcaagtggatattcagacctctttgaagccttcgttggaaacgggatttcttcatattatgctagacagaagaattctcagtaacttccttgtgttgtgtgtattcaactgacagagttgaactttcatttagagagagcagatttgaaacactctttttgtggaatttgcaagtggagatttcaagcgctttgaggccaaaggcagaaaaggaaatatcttcgtataaaaactagacagaatcattctcagaaactgctgcgtgatgtgtgcgttcaactctcagagtttaacttttcttttcattcagcggtttggaaacactctgtttgtaaagtctgcacgtggaaattttgaccacttagaggccttcgttggaaacgggattttttcatgtaaggctagacagaagaattcccagtaacttccttgtgttgtgtgcattcaactcacagagttgaacgttcccttagacagagcagatttgaaacactctatttgtgcaatttgcaagtgtagttttcaagctctttaaggtcaacggcagaaaaggaaatatcttggtttcaaaactagacagaatcattcccacaaactgcgttgtgatgtgttcgttcaactcagagagtttaacctttctgttcatagagcagttaggaaacactctgtttgtaaagtctgtaagtggatattctgacatcttgtggccttcgttggaaacgggatttcttcatattctgctagacagaagaattctcagtaacttccttgtgttgtgtgtattcaactcacagagttgaacgatcctttacacagagcagacttgaaacactctttttgtggaatttgcaagtggagatttcagcctctttgtggtcaatggtagaaaaggaaatatcttcgtataaagactagacagaatgattcccagaaactcctttgtgatgtgtgcgttcaactcacagagtttaacctttcttttcatagagcagttaggaaacactctgtttgtaaagtctgcaaggggatattcagacctctttgaggccttcgttggaaacgggatttcttcgtattctgctagatagaagaattctcagtaacttccttgtgttgtgtgtattcaactgacagagttgaactttcatttagagagagcagatttgaaactctgtttttgtggaatttgcaagtggagatttcaagcgctttgaggccaaaggcagaaaaggaaatatcttcgtataaaaactagacagaatcattctcagaaactgctctgcgatgtgtgcgttcaactctcagagtttaacttttcttttcattcagcagtttggaaacactctgtttgtaaactctgcacgtggatattttgaccacatagaggccttcgttggaaacgggtttctttcctgtaaggctagacagaagtattcccagtaacttccttgtgttgtgtacattcaactcacagagttgaacgttcccttagacagagcagatttgaaacactctttttgtgcaattggcaagtggagatttcaagcgctttaaggtcaatggcagaaaaggaaatatcttcgtttcaaaactagacagaatcattcccacaaactgcgttgtgatgtgttcgttcaactcacagagtttaacctttcttttcatagagcagttaggaaacagtctgtttgtaaattctgtaagtggatattctgacatcttgtggccttcgttgtaaacgggatttcttcatattctgctagacagaagaattctcagaaacttccttgtgctgtgggttttcaactcacagagttgaacgatcctttacacagagcagacttgaaacactccttttgtggaatttgcaagtggagatttcagccgctttgaggtcaatggtagaataggaaatatcttcctatagaaagtagacagaatgattctcagaaactcctttgtgatgtgtgcgttcaactcacagagtttaacctttcttttcatagagcagttaggaaacactctgtttgtaaattctgcaagtggatattcagacctctttgagaccttccttggaaacgggtttttttcatataaggctagacagaagaattcccagtaacttccttgtgttgtgtgtgttcaactcacagagctgaactttcatttacacagagcagatttgaaacactctttttgtggaatttgcaagtggagatttcaagcgctttaaggccaaaggcagaaaaggaaatatcttcgtttcaaaactagacagaatcattctcggaaactgctctgtgatgtgtgcgttcaactctcagagtttaacttttcttttcattcagcagtttggaaacactctgtttgtaaagtctgcacgtggatattttgaccacttaaaggccttcgttggaaacgtgtttttttcctgtaaggctagacagaagaattcccagtaacttccttgtgttgtgtacattcaactcacagagttgaacgttcccttagacagagcagatttgaaacactctttttgtgcaattggcaagtggagatttcaagcgctttgaggtcaatggcagaaaaggaaatatcttcgtttcaaaactagacagaatcattcccacaaactgcgttgtgatgtgttcgttcaactcacagagtttaacctttcttttcatagagcaggtaggaaacactctgttggtaaattctgtaagtggatattctgacatcttgtggccttcgttggaaacgggatttctacatattctgccagacagaagaattctcagaaacttacttgtgttgtgtgttttcaactctcagagttgaacgatcctttacacagagcagacttgaaacactccttttgtggaatttgcaagtggagatttcagccgctttgaggtcaaaggtagaataggaaatatcttcctatagaaagtagacagaatgattctcagaaactcctttgtgatgtgtgcgttcaactcacagagtttaacctttcttttcacagagcagttaggaaacactctgcttgtaaagtctgcaagtggatattcagccctctttgaggccttcgttggaaacgggtttttttcatataaggctagacagaagaattctcagaatcttccttgtgttgtgtgtattcaactcacagagttgaacgatccttttcacagagcagacttgaaacactctttttgtggaatttgcaagtggagatttcagccgcgttgaggtcaatggtagaaaaggaaatatgttcgtataaaaactagacagaatgattctcataaactcctttgtgaagtgtgcgttcaaatcacagagtttaacttttcttttcatagagcagttaggaaacactctgtttgtaaagtctgcaagtggatattcagacctctttgaagccttcgttggaaacgggatttcttcatattatgctagacagaagaattctcagtaacttccttgtgttgtgtgtattcaactcacagagttgaacgatcctttacacagagcagccttgaaacattctttttgtggaatttgcaagtggagatttcagccgctttgaggtcaatggtagaataggaaatatcttcctatagaaactagacagaatgattctcagaaactcctttgtgatgtgtgcgttctactcacagagtttaacctttcttttcatagagcagttaggaaacactctgtttgtaaagtctgcaagtggatatacagacctccttgaggccttcgttggaaacgggatttcttcatattatgctagacagaagaattcccagtaacttccttgtgttgtgtgtgttcaactcacagagttgaactttcatttacacagagcacatttgaaacactctttttgtggaatttgcaagtggagatttcaagcgctttgaggccaaaggcagaaaaggaaatatcttcgtttcaaaactagacagaatcattctcagaaactgctctgcgatgtgtgcgttcaactctcagagtttaacttttgttttcattcagcagtttggaaacactctgtttgtaaagtctgcacgtggataatttgaccacttagaggccttcgttggaaacgggttttttccatgtaaggctagacacaagaattcccagtaacttcccttgtgttgtgtacattcaactcacagagttgaacgttcccttagacagagcagatttgaaacactctttttgtgcaattggcaaatggagatttcaagcgctttaaggtcaatggcagaaaaggaaatatcttcgtttcaaaactagacagaatcattcccacaaactgcgttgtgatgtgttcgttcaactcacagcagtttaacctttctattcatagagcagttaggaaacactctgtttgtaaagtctgtaagtggatattctgacatcttgtggccttcgttggaaacgggatttcttcctattctgctagacagaagaattctcagtaacttccttgtgttgtgtgcattcaactcacagagttgaacgatcctttacacagagcagacttgaaacactctttttgtggaatttgcaagtggagatttcagccgctttgaggtcaatggtagaaaacgaaatatcttcgtatagaaactagacagaatgattctcagaaactcctttgtgatgtgtgtgttcaactcacagagtttaacctttcttttcatagagcagttaggaaacactctgtttgtaaagtctgcaagtggatattcagacctccttgaggccttcgttggaaacgggatttcttcatattctgctagacagaagaattctcagtaacttccttgtgttgtgtttattcaactcacagagttgaacgatcctttacacagagcagacttgaaacactctttttgtggaatttgcaagtggagatttcagccgctttgaggtcaatagtagaaaaggaaatatcttcgtagaaaaactagacagaatcattctcagaaactgctgcgtgatgtgtgcgttcaactctcagagtttaacttttcttttcattcagcggtttggaaacactctgtttgtaaagtctgcacgtggatattttgaccacttagaggccttcgttggaaacgggttttttgcatgtaaggctagacagaagaattcccagtaacttccttgtgttttgtacattcaacccacagagttgaacgtttccttagacagagcagatttgaaacactctttttgtgcaattggcaagtggtgatttcagccgctttcaggtcaaaggtagaaaaggaaatatcttcctataaaaactagacagaatcattcccacaaactgcgttgtgatgtgttcgttcaactcacagagtttaacctttctgttcatacagcagttaggaaacactctgtttgtaaagtctgtaagtggatattctgacattttgtggccttcgttggaaatgggatttcttcatattctgctagacagaagaattctcagtaagttccttgtgttgtgtgtattcaactcacagagttgaacgatcctttacacagagcagacttgaaacactctttttgtggaatttgcaagtggagatttcagccgctttgaggtcaatggcagaataggaaatatcttcctatagaaactagacagaatgattctcagaaactcctttgtgatgtgtgcgttcatctcacagagtttaacttttcttttcatagagcagttaggaaacactctgtttgtaaagtctgcatgtggatattcagacctctttgaggccttcgttcgaaaagggatttcttcatattatgctagacagaagaattctcagtaacttccttgtgttgtgtgtattcaactgacagagttgaactttcatttagagagagcagatttgaaacactgtttttgtggaatttgcaaatggagatttcaagcgctttggtgccaaaggcagaaaaggaaatatcttcgtataaaaactagactgaatcattctcagaaactgctgcgtgatgtgtgcgttcaactctcagagtttaacttttcttttcattcagcggtttggaaacactctgtttgtaaagtctgcacgtggatattttgaccacttagaggccttcgttggaaacgggttttttttcatgtaaggctagacagaagaattcccagtaacttccttctgttgtgtgcattcaactcacagagttgaacgttcccttagacagagcagatttgaaacactctatttgtgcaatttgcaagtgtagatttcaagcgctttaaggtcaacggcagaaaaggaaatatcttcgtttcaaaactagacagaatcattcccacaaactgcgttgtgatgtgttcgttcaactcacagagtttaacctttctgttcatagagcagttaggaaacactctgtttgtaaagtctgtaagtggatattctgacatcttgtggccttcgttggaaacgggatttcttcctattctgctagacagaataattctcagtaacttccttgtgttgtgtgtattcaactcacagagttgaaggatcctttacagagagcaggcttgaaacacactttttgtcgaatttgcaagtggagatttcagccgctttgaggtcaatggtagaataggaaatatcttcttatagaaactagacagattgattctcagaaactcctttgtgatgtgtgcgttcaactcacagagtttaacctttcttttcatagagcagttaggaaacactctctttgtaaagtctgcaagtggatattcagacctccttgaggccttcgttggaaacgggatttcttcatattatgctaggcagaagaattctcagtaacttccttgtgttgtgcgtattcaactcacagagttgaacgatcctttacacagagcagacgtgaaacactctttttgtggaatttgcaagtggagatttcagccgctttgaggtcaatggtagaataggaaatatcttcctatagaaactagacagaatcattctcagaaaatgctctgtgatgtgtgcgttcaactctcagagtttaacttttcttttcattcagcagtttggaaacactctgtttgtaaagtctgcacgtggatattttgaccacttagaggccttcgttggaaacgggtttttttcatgtaagggtagacagaagaattctcagtaacttccttgtgttgtgtgtattcaactcacagagttgaacgatcctttaaacagagcagacttgaaacactctatttgtgcaatttgcaagtgtagatttcaagcgctttaaggtcaatggcagaaaaggaaatatcttcgttttaaaactagacagaatcattcccacaaactgcgttgtgatgtgttcgttcaactcacagagtttaacttttctgttcatagagcagttaggaaacactctgtttgtaaagtctgcaattggatattcagacctccttgaggcattcgttggaaacgggatttcttcatattctgctagacagaataattctcagtaacttccttgtgttgtgtgtattcaactcacagagttgaacgatcctttacacagagcagacttgaaacattctttttgtggaatttgcaactggagatttcagccgctttgaggtcaatggtagaataggagatatcttcctatagaaactagacagaatgattctcagaaactcctttgtgatgtgtgcgttcaactcacagagtttaacctttcttttcatagagcagttaggaaacactctgtttgtaaactctgcaagtggatattcagacctccctgaggccttcgtcggaaatgggatttcttcatattctgctagacagaagaattcccagtaacttccttgtgttgtgtgtattcaactcacagagttgaactttcatttacacagagcaaatttgaaacactctttttgtggaatttgcaagtggagatttcaagcgctttgaggccaaaggcagaaaaggaaatatcttcgtataaaaactagacagaatcattctcagaaactgctctgcgatgtgtgcgttcaactctcagagtttaacttttcttttcattcagcagtttggaaacactctgtttgtaaagtctgcacgtggatattttgatcacttagaggccttcgttggaaacgggtttctttcttgtaaggctagacagaagaattcccagtaacttccttgtgttgtgtacattcaactcacaggagttgaacgttcccttagacagagcagatttgaaacactctttttgtgcaattggcaagtggagatttcaagcgctttatggtcaatggcagaaaaggaaatatcttcgtttcaaaactagacagaatcattcccacaaactgcgttgtgatgtgttcgttcaactcacagagtttaacctttcttttcatagagcagttaggaaagagtctgtttgtcaattctgtaagtggatattctgacatctagtggccttcgttggaaacgggatttcttcatattctgctagacagaagaattctcagtaacttccttgtgttgtgtgtattcaactcacagagttgaacgatcttttacagagagcagacttgaaacactctttttgtggaatttgcaagtggagatttcagccgctttgaagtcaaaggtagaataggaaatatcttcctatagaaactagacagaatgattctcagaaactcctttgtgatgtgtgcgttcaactcacagagtttaacctttcttttcatagagcagttaggaaacactctgtttgtaaagtctgcaagtggatattcagacctcattgaggccttcgttggaaacgggatttctacatattatgctagacagaagaattctcagtaacttccctgtgttgtgtgtattcaactgacagagttgaactttcatttagagagagcagatttgaaacactgtttttgtggaatttgcaagtggagatttcaagcgctttggggccaaaggcagaaaaggaaatatcttcgtataaaaactagacagaatcattctcagaaactgctctgcgatgtgtgcgttcaactctcagagtttaacttttcttttcattcagaagtttggaaacactctgtttgtaaagtctgcacgtggataacttgaccacttagaggccttcgttggaaacgggtttttttcatgtaaggctagacagaagaattcccagtaacttccttgtgttgtgtgcactcaactcacagagttgaacgttcccttagacagagcagatttgaaacactctatttgtgcaatttgcaagtggagatttcaagcgctttatggtcaatggaagaaaaggaaatatcttcgtttcaaaactagacagataatcattcccacaaactgcgttgtgatgtgttcgttcaactcacagtagtttaacctttcttttcatagagcagttaggaaacagtctgtttgaaaattctgtaagtggatattctgacatcttgtggccttcgttggaaacgggatttcttcatattctgctagacagaagaattctctgtaactgccttgtgttgtgtgtattcaactcacagagttgaacgatcctttacacagagcagacttgaaacactctttttttggaatttgcaagtggagatttcagccgctttgaggtcaatggtagaataggaaatatcttcctatagaaagtagacagaatgattctcagaaactcctttgtgatgtgtgtgttcaactcacagagtttaacctttcttttcatagagcagttaggaaacactctgtttgtaaagtatgcaagtggatattcagacctctttgaggccttcgttggaaacgggatttttcatataaggctagacagaagaattcccagtaacttccttgtgttgtgtgtgttcaactcacagagttgaactttcatttacacagagcagatttgagacactctttttgtggaatttgctaatggagatttcaagcgctttgaggccaaaggcagaaaaggaaatatcttcgtataaaaactagacagaatcattctcagaaactgctctgcgatgtgtgcgttcaactctcagagtttaacttttcttttccttcagcagtttggaaacactctgtttgtaaagtctgcacgtggatattttgaccacttagaggccttcgttggaaacgggtttttttcctgtaaggctagacagaagaattcccagtaacttccttgtgttgtgtgcattccactcacagagttgaacgttcccttagacagagcagatttgaaacactctatttgtgcaatttgcaagtgtagatttcaagcgctttaaggtcaatggcagaaaaggaaatatcttcgtttcaaaactagacagaattattcccacaaactgcgttgtgatgtgttcgttcaactcacagagtttaacctttcttttcatagagcagttaggaaacagtctgtttgtaaattctgtaagtggatattctgacatcttgtggccttcgttggaaacgggatttcttcatattctgctagacagaagaattctcagtaacttccttgtgttgtgtgtattcaactcacagagttgaacgatcctttacacagagcagacttgaaacactctttttctggaatttgcaagtggagatttcagccgctttgaggtcaatggtagaaaaggaaactatcttcttataaagactagacagaatgattctcagaaactcctttgtgatgtgtgcgttcaactaacagagtttaacctttcttttcatagagcagttaggaaacactctgtttgtaaagtctgcaagtggatattcagacctctttgaggccttcgttggaaacgggatttcttcatattctgctagacagaagaattctcagtaacttccttgtgttgtgtgtattcaactgacagagttgaactttcatttatggagagcagatttgaaacactggttttgtggaatttgccagtggagatttcaagcgctttggggccaaaggcagaaaaggaaatatcttcgtataaaaactagacagaatcattctcagaaactgctctgcgatgtgtgcgttcaactctcagagtttaacttttcttatcattcagcagtttggaaacactctgtttgtaaagtctgcacgtggataatttgaccacttagaggccttccttggaaacgggtttttttcatgtaaggctagacagaagaattcccagtaacttccttgtgttgtgtgcattcaactcacagagttgaacgttcccttagacagagcagatttgaaacactgtatttgtgcaatttgcaagtgtagatttcaagcgctttaaggtcaatggcagaaaaggaaatatcttcgtttcaaaactacacagaatcattcccacaaactgcgttgtgatgtgttcgttcaactcacagagtttaacctttcttttcatacagcagttaggaaacagtctgtttgtaaattctgtaagtggatattctgacatcttgtggccttcgttggaaacgggatttcttcatattctgctagacagaagaattctcagtaacttccttgtgttgtgtgtattcaactcacagagttgaacgatcctttacacagagcagacttgaaacactcgttttgtggaatttgcaagtggagatttcagccgcgttgaggtcaatggtagaaaaggaaatatcttcgtataaaaactagacagaatgattctcagaaactcctttctgatgtgtgcgttcaactcgcagagtttaacttttcttttcattgagcagttaggaaacactctgtttgtaaagtcagcaagtggatattcagacctctttgaggccttcgttggaaacgggatttctgcatattatgctagacagaaggattcccagtaacttccttgtgttgtgtgtgttcaactcacagagttgaactttcatttacacagaggagatttgaaacactctttttgtggaatttgcaggtggagatttcaagcgctttgaggccaaaggcagaaaaggaaatatcttcgtataaaaactagacagaatgattctcagaaactcctttgtgatgtgggcgttcaactcacagagtttaacgtttcttttcatagagccgttaggaaacactctgtttgtaaagtctgcacgtggatatttggacttctttgaggccttcgttggaaacgggtttttttcatgtaaggctagacggaagaattcccagtaacttccttgtgttgtgtgcattcaactcacagagctgaacgttcccttagacagagcagatttgaaacactctatttgtgcaatttgcaagtgtagatttcaagcgctttaaggtcaacggcagaaaaggaaatatcttcgtttcaaaactagacagaatcattcccacaaactgcgttgtgatgtgttctttcaactcacagagtttaacctttctgttcatagagcagttaggaaacactctgtttgtaaagtctgtaagtggatattctgacatcttgtggccttcgttggaaacgggatttcttcatattactgctagacagaataattctcagtaatttccttgtgttgtgtgtattcaactcacagagttgaaggatcctttacagagagcaggcttgaaacactctttttgtcgaatttgcaagtggagatttcagccgctttgaggtcaatggtagaataggaaatatcttcttatagaaactagacaaaatgattctcataaactcctttgtgatgtgtgcgttcaactcacagagtttaacctttcttttcatagagcagttaggaaacactctgtttgtaaagtctgcaagtggatattcagacctacttgaggccttcgttggaaacgggatttcttcatattctgctagacagaagaattcccagtaacttcccttgtgttgtgtgtgttcaactcacagagttgaactttcatttacacagagcagatttgaaacactctttttgtggaatttgaaagtggagatttcaagcgctttgaggccaaaggcagaaaaggaaatatcttcgtataaaaactagacagaatcattctcagaaactgctctgcgatgtgtgcgttcagctctcagagtttaacttttcttttcattcagcagtttggaaacactctgtttgtaaagtctgcacgtggatattttgaccacttggaggccttcattggaaacgggtttttttcatgtaaggctagacagaagaattcccagtaacttccttgtgttgtgtacattccactcacagagttgaacgttcccttagacagagcagatttgaaacactctttttgtgcaattggcaagtggagatttcaagcgctttaaggtcaatggcagaaaaggaaatatcttcgtttcaaaactagacagaatcattcccacaaactgcgttgtgatgtgttcgttcaactcacagagtttaacctttcttttcatagagcagttaggaaacagtctgtttgtaaattctgtaagtggatattctgacatcttgtggccttcgttggaaacgagatttcttcatattctgctagacagaagaattctcagaaacttccttgtgttgtgtgttttcaactcacagaggtgaacgatcctttacacagagcagacatgaaacagtctttttgtggaatttggaagtggagaattcagccgctttcaggtcaatggtagaataggaaatatcttcctatagaaaattgacagaatgattctcagaaactcctttgtgatgtgtgcgttcaactcacagagttcaacctttcttttcatagagcagttgggaaacactctgtttgtaaagtctgcatgtggatattcagacatccttgaggctttcgttggaaacgggatttcttcatattctgctagaaagaagaattctcagtaacttccttgtgttgtgtgtattcaactgacagagttgaactttcatttagagagagcagatttgaaacactgtttttgtggaatttgcaagtggagattttaagcgctttggggccaaaggcagaaaaggaaatatcttcgtataaaaactagacagaatcattctcagaaactgctctgcgatgtgtgcgttcaactctcagagtttaacttttcttttcattcagcagtttggaaacactctgtatgtaaagtctgcacgtggatattttgaccacttagaggccttcgttggaaacgggtttttttcctgtaaggctagacagaagaattcccagtaacttccttgtgttgtgtacattcaactcacagagttgaacgttcccttagacagagcagatttgaaacactctttttgtgcaattggcaaatggagatttcaagcgctttaagttcaaaggcagaaaaggaaatatcttcgtttcaaaactagacagaatgattctcagaaactcctttgtgatgtgtgcgttcaactcaaagagtttaacctttcttttcatagagcagttaggaaacactctgtttgtaaagtctgcaagtggatattcagacctctttgaggccttcgttggaaacgggatttcttcatattatgctagacagaagaattctcagtaacttccttgtgttgtgtgtattcaactcacagagttgaacgatcctttacacagagcagactttaaacactctttttgtggaatttgcaagtggagatttcagccgctttggggtcaatagtagaaaaggaaatatcttcgtagaaaaactagacagaatgattctcagaaaatcctttgtgatgtgtgcgttcaactcacagagtttaacttttcttttcatagagcagttaggaaacactctgtttgtaaagtcttcaagtggatattcagacctctttgaggccttcgttggaaacgggatttcttcatattatgctagacagaagaattctcagtaacttccttgcgttgtgtgtattcaactgatagagttgaactttcatttagacagagcagatttgaaacacgctttttgtggaatttgcaagtcgagatttcaagcgctttgaggccaaaggcagaaaaggaaatatcttcgtataaaaactagaccgaatcattctcagaaactgctctgcgatgtgtgcgttcaactctcagagtttaactttgcttttcattcagcagtttggaaacactctgtttgtaaagtctgcacgtggatattttgaccacttagaggccttcgttggaaacgggtttttttcctgtaaggctagacagaagaattcccagtaacttccttgtgttgtgtacattcaactcacagagttgaacgatcccttagacagagcagatttgaaacactctttttgtgcaattggcaaatggagatttcaagcactttaaggtcaatcgcagaaaaggaaatatcttcgtttcaaaactagacagaatgattctcagaaactcctttgtgatgtgtgcgttcaactcacagagtttaacttttcttttcatagagcagttaggaaacactctgtttgtaaagtctgcaagtggatattcagacgtctttgaggccttcgttggaaacgggatttcttcatattctgctagacagaagaattctcagtaacttccttgtgttttgtgtattcaactcacagagttgaacgatcctttacacagagcagacttgaaacacactttttgtggaatttgcaagtggagatttcagccgctttgaggtcaatggtagaataggaaatatcttcctatagaaactagacagaatgattctgagaaactcctttgtgatgtgtgcattcaactcacagagtttaacctttcttttcatagagcagttaggaaacactgtgcttgtatagtctgcaagtggatactcagacctccttgaggccttcgttggaaacgggatttcttcctattatgctagacagaagaattctcagtaactcccttgtgttgtgtgtattcaactgacagagttgaactttcatttagagggagcagatttgaaacactgtttttgtggaatttgcaagtggagatttcaaacgctttggggccaaaggcagaaaaggaaatatcttcgtataaaaactagacagaatcattctcagaaactgctctgcgatgtgtgcgttcaactctcagagtttaacttttcttttcattcagcagtttggaaacactctgtttgtaaagtctgcacgtgcataatttgaccacttagaggccttcgttggaaacggttttttttcatgtaaggctagacagaagaattcccagtaacttccttgtgttgtgtgcattcaactcacagagttgaacgttcccttagacagagcagatttgaaacactctatttgtgcaatttgcaagtgtagatttcaagcgcttaaagtcaacggcagaaaaggaaatatcttcgtttcaaaactagacagaatcattcccacaaactgcgttgtgatgtgttcgttcaactcacagagtttaacctttcttttcatagagcagttaggaaacactctgtttgtaaagtctgcaagtggatattcagacctctttgaggccttcgttggaaacgggatttcttcatatactgctggacagaggaattctcagtaacttccttgtgttgtgtgtattcaactcacagagttgaacgatcctttacacagagcagacttgaaacactctttttgtggaatttgcaagtggagatttcagccgctttgatgtcaatggtagaaaaggaaatatcttcgtataaagccgagacagaatgattctcagaaactcctttgtgatgtgtgcgttcaactcacagagtttaacctttcttttcatagagcagttagtaaacactctgtttataaagtctgcaagtggatattcagacccctttgaggccttcgttggaaacgggatttcttcatattctgctagacagaagaattcccagtaacttccttgtgttgtgtgtgttcgactcacagagttgaactttcatttacacagagcagatttgaaacactctttttgtggaatttgcaagtggagatttcaagcactttgaggccaaaggcagaaaaggaaatatacttcgtttcaaaactagacagaatcattctcagaaactgctctgcgatgtgtgcgttcaactctcagagtttaacttttcttttcattcagcagtttggaaacactctgtttgtaaagtcttcacgtggataatttgaccacttagaggccttcgttggaaacgggttttttcatgtaaggctagacagaagatttcccagtaacttccttgtgttgtgtacattcaactcacagagttgaacgttcccttagacagagcagatttgaaacactctttttgtgcaattggcaaatggagatttcaagcgctttaatgtcaatggcagaaaaggaaatatcttcgtttcaaaactagacagaatgattctcagaaactcctttgtgatgtgtgcgttcaactcacacagtttaacctttctgttcatagagcagttaggaaacactctgtttgtaaagtctgtaagtggatattctgacatcttgtggccttcgttggaaacgggatttcttcatattctgctagacagaagagttctcagtaacttccttgtgttgtgtgtattcaactcacacggttgaacgatcctttacacagagcagacttgtaacactctttttgtggaatttgcaagtggagatttcagccgctttgaagtcaaagtagaaaaggaaatatcttcctataaaaactagacagaatgattctcagaaactcctttgtgatgtgtgcgttcaactcacagagtttaacctttcttgtcatagagcagttaggaaacactctgtttgtaaagtctgcaagtggatattcagacatctttgaggctttcgttggaaacgggatttcttcatattctgctagacagaagaattctcagtaacttccttgttttgtgtgtattcaactgacagagttgaactttcatttagagagagcagatttgaaacacggtttttgcggaatttgcaagtggagatttcaagcgctttggggccaaaggcagaaaaggaaatatcttcgtataaaaactagacagaatcattctcagaaactgctgcgtggtgtgtgcgttcaactctcagagtttaacttttcttttcattcagcggtttggaaacactctgtttgtaaagtctgcacgtggatattttgaccacttagaggccttcgttggaaacgggttttcttcatgtaaggctagacagaagaattcccagtaacttccttgtgttgtgtgcattcaactcacagagttgaacgttcccttagacagagcagatttgaaacactctttttgtgcaattggcaagtggagatttcaagcgctttaaggtcaatggaagaaaaggaaatatcttcgtttcaaaactagacagaagaattctcagtaacttccttgtgttgtgtgtattcaactcacagagttgaacgatcctttacacagaacagacttgtaacactctttttgtggaatttgcaagtggagatttcagccattttgaagtcaaaggtagaaaaggaaataacttcctataaaaactagacagaatgattctcagaaactcctttgtgatgtgtgcgttcaactcacagagtttaacctttgttttcatagagcagttaggaaacactctgcttgtaaagtctgcaagtggatattcagccctctttgaggccttcgttggaaacgggtttttttcatataaggctagacagaagaattctcagtaacttccttgtgttgtgtgtattcaagtgacagagttgaactttcatttagagagagcagatttgaaacactgtttttgtggaatttgcaattggagatttcaagcgctttggggccgaaggcagaaaaggaaatatcttcgtataaaaactagacagaatcattctcagaaactgctctgcgatgggtgcgttcaactctcagagtttaactttgcttttcattcagcagtttggaaacactctgtttgtaaagtctgcacgtggataatttgaccacttagaggccttcgttggaaacgggtttttttcatgtaaggctagacagaagaattcccagtaacttccttgtgttctgtacattcaactcacagagttgaacgttcccttagacagagcagatttgaaacactctttttgtgcaattggcaagtggagatttcaagcgctttaaggtcaatggcagaaaaggaaatatcttcgtttcaaaactagacagaatgattctcagaaactcctttgtgatgtgtgcgttcaactcacagagtttaacctttctgttcatagagcagttaggaaacactctgtttgtaaagtctgcaagtggatattcagacctccttgaggccttcgttggaaacgggatttctttatattctgctagacagaagaattctcagtaacttccttgtgttgtgtgtattcaacacacagagttgaacgatcctttacacagagcagacttgaaacactctttttgtggaatttgcaagtggagatttcagcctctttgaggtcaatggtagaataggaaatatcttcctatagaaactagacagaatgattctgagaaactcctttgtgatgtgtgcgttcaactcacagagtttaacctttcttttcatagagcagtttggaaacactccgtttgtaaactctgcaagtggatattcagacctccttgagaccttccttggaaacgggatttcttcatattatgctagacagaagaattctcagtaacttcctagtgttgtgtgtattcaactgacagagttgaactttcatttagagagagcagatttgaaacactgtttttgtggaatttgcaagtggagatttcaagcggtttggggccaaaggcagaaaaggaaatatcttcgtataaaaactagacagaatcattctcagaaactgctgcgtgatgtgtgcgttcaactctcagagtttaacttttcttttcattcagcagtttggaaacactctgtttgtaaagtctgcacgtggaaattttgaccacttagaggccttcgttggaaacgggtttttttcatgtaaggctagacagaagaattcccagtaacttcccttgtgttgtgtgcattcaactcacagagttgaacgttcccttagacagagcagatttgaaacactctatttgtgcaatttgcaagtgtagttttcaagctcttttaggtcaacggcagaaaaggaaatatcttggtttcaaaactagacagaatcattcccacaaactgcgttgtgatgtgttcgttcaactcacagagtttaacctttctgttcatagagcagttaggaaacactctatttgtaaagtctgcaagtggatattcagacctccttgaggccttcgttggaaacgggatttcttcatattctgctagacagaagaattctcagaatcttccttgtgttgtgtgtattcaactcaccgagttgaacgatcctttacacagagcagacttgaaacactctttttgtggaatttgcaagtggagatttcagccgctttgaggtccatgttagaaaaggaaatatcttcgtacaaaaattgacagaatgattctcagaaacttctttgtgatgtgtgccttcaactcacagagtttaacctttcttttcatagagcagttaggaaacactctgtttgtaaagtctgcaagtggatattcagacctctttgaggccttcgttggaaacgggtttttttcatataaggctagacagaagaattcccagtaacttccttgtgttgtgtgtgttcaactcacagagttgaactttcatttacacagagcagattggaaacactctttttgtggaatttgcaagtggagatttcaagcgctttgaggacaaaggcagaaaaggaaatatcttcgtataaaaattagacagaatcattctcagaaactgctctgcgatgtgtgcgttcaactctcagagtttaacttttcttttcattcagcagtttggaaacactctgtttgtaaagtctgcacgtggatattttgaccacttagaggcctccgttggaaacgggtttctttcctgtaaggctagacagaagaattcccagtaacttccttgtgttgtgtgcattcaactcacagagttgaacgttcccttagacagagccgatttgaaacactctatttgtgcaattggcaagtgtagatttcaagcgctttaaggtcaacggcagaaaaggaaatatcttcgtttcaaaactagacagaatgattctcagaaactcctttgtgatttgtgcgttcaactcacagagtttaacttttcttttcatagagcagttaggaaacactctgtttgtaaagtgtgcaagtggatattcagacctctttgaggccttcgttggaaacgggatttcttcatattatgctagacagaataattctcagtaacttccttgtgttgtgtgtattcaactcacagagttcaacgatcctttacagagagcagacttgaaacactctttttgtggaatttgcaagtggagatttcagccgctttgaggtcaatggtagaataggaaatatcttcctatagaaactagacagaatgattctcagaaactcctttgtgatgtgtgcgttcaactcacagagtttaaccattcttttcatagagcagttaggaaacactctgtttgtaaagtctgcaaatggatattcagacctccttgaggccttcgttggaaacgggatttcttcatattctgctagacagaagaattctcagtaacttccttgtgttgtgtgtattcaactcacagacttgaatgatcctttacacagaacagtcttgaaacactctttttgtggaatttgcaagtggagatttcagccgatttgaggtcaatggtagaatagaaaatatcttcctatagaaactagacagaataattctcagaaactcctttgtgatgtgtgcgttcaactcacagagtttaacctttcttttcatagagcagttaggaaacactctgtttgtaaagtctgcaagtggatattcagacctctttgaggccttcgttggaaacgggtttttttcatataaggctggacagaagaattctcagtaacttccctgtgttgtgtgttttcaactgacagagttgaactttcatttagagagagcagatttgaaaaactgtttttgtggaatttgcaagtggagatttcaagcgttttggagccaaaggcagaaaaggaaatatcttcgtataaaaactagacagaatcattctcagaaactgctgcgtgatgtgtgcgttcaactctcagagtttaacttttcttttcattcagcggtttggaaacactctgtttgtaaagtctgcacgtggatattttgaccacttagaggccttcgttggaaacgggttttttcatgtaaggctagacagaagaattcccagtaacttccttgtgttgtgtacattccactcacagagttgaacgttcccttagacagagcagatttgaaacactctttttgtgcaattggcaaatggagatttcaagggctttaaggtcaatggcagaaaaggaaatatcttcgtttcaaaactagacagaatcattcccacaaactgcgttgtgatggttcgttcaactcacagagtttaaactttcttttcatagagcagttaggaaacagtctgtttgtcaattctgtaagtggatattctgacatcttgtggccttcgttggaaacgggatttcttcatattctcctagacagaagaattctcagaatcttccttgtgttgtgtgtattcaactcacagagttgaacgatcctttacacagagcagacttgaaacactctttttgtggaatttgcaagtggagatttcagccgctttgaggtccatggtagaaaaggaaatatctttgtataaaaactagacagaatgattctcaggaactcctttgtgatgtgtgtgttcaactcacagagtttaacctttcttttcatagagcagttagtaaacactctgtttataaagtctgtaagtgggtattcagacccctttggggccttcgttggaaacgggatttcttcatattatgctagacagaagaattctcagaaacttccttgtgttgtgtgtattcaactcacagagttgaacgatcgtttacacagagcagacttgaaacactctttttgtggaatttgcaagtggagatttcagccgctttgaggtcaatggtagaaaaggaaatatcttcgtataaaaactagacagaatgattctcagaaactcctttgtgatgtgtgcgttcaactcacagagttcaacctttcttttcacagagcagttgggaaacactctgtttgtaaagtctgcaagtggatattcagacttctttgaggccttcgttggaagcgggatttcttcatgttctgctagacagaagaattctcagtaacttccttgtgttgtgtgtattcaactgacagagttgaactttcatttagagagagcagatttgaaacacagtttttgtggaatttgcaagtggagatttcaagcgctatggggccaaaggcagaaaaggaaatatcttcgtataaaaactagacagaatcattctcagaaactgctgcgtgatgtgtgcgttcaactctcagagtttaacttttcttttcattcagcggtttggaaacactctgtttgtaaagtctgcacgtggatattttgaccacttagaggccttcgttggaaacgggtttctttcatgtaaggctagacagaagaattcccagtaacttccttgtgttgtgtgcattcaactcacagagttgaacgttcccttagacagagcagatttgaaacactctatttgtgcaatttgcaagtgtagatttcaagcgctttaaggtcaacggcagaaaagaaaatatcttcgtttcaaaactagacagaatcattcccacaaactgcgttgtgatgtgttcgttcaactcacagagtttaacctttcttttcatagagcagttaggaaacagtctgtttgtcaattctgtaagtggatattctgacatgcttgtggccttcgttggaaacgggatttcttcatattctgctagacagaagaattctcagtaacttccttgtgttgtgtgtattcaactcacagagttgaacgatcctttacacagagcagacttgaaacactctttctgtggaatttgcaagtggagatttcagccgctttgaggtcaatggtagaaaaggaaatatcttcgtataaagactagacagaatgattctcagaaacttctttgtgatgtgtgcgttcaactcacagagtttagcctttcttttcatagagcagttaggaaacactctgtttgtaaactctgcaagtggatattcagacctctttgaggccttcgttggaaactgggatttcttcatactatgctagacagaagaattcccagtaacttccatgtgttgtttgtgttcaactcacagagttgaactttcatttacacagagcagatttgaaacactctttttgtggaatttgcaaatggagatttcaagcgctttgaggccagaggcagaaaaggaaatatcttcgtataaaaactagacagaaatcattctcagaaactgctgcgtgatgtgtgcgttcaactctcagagtttaacttttcttttcattcagcggtttggaaacactctgtttgtaaagtctgcacgtggatattttgaccacttagaggccttcgttggaaacgggtttttttcatgtaaggctcgacagaagaattcccagtaacttctttgtgttgtgtgcattcaactcacagagttgaacgttcctttagaaagagcagatttgaaacactctttttgtgcaatttgcaagtggagatttcaagcgctttagggtcaatggcagaaaaggaaatatcttcgtttcaaaactagacagaatcattcacacaaactgcgttgtgatgtgtgcgttaaactcacagagtttaacctttcttttcatagagccgtctgtaagcgctctgtttgtcaagtctgcaagtggatattctgacctttttgtggacttcgttggaaacgggatttcttcctataatactagacagaagaattctcagtaacttccttgtgttgtgtgtattcaactcacggagttgaacgatcctttacacagagcagacttgaaacactctttttgtggaatttgcaagtggagatttcagccgctttggggtcaatggtagaaaaggaaatatcttcgtataaagactagacagaatgattctcagaaactcctttgtgatgtgtgcgttcaactcacagagttcaacctttcttttcatagagcagttaggaaacactctgtttgtaaagtctgcaagtggatattcagacatccttgaggctttcgttggaaacgggatttcttcatattctgctagaaagaagaattctcagtaacttccttgtgttgtgtgtattcaactgacagagttgaactttcatttagagagagcagatttgaaacactgtttttgtggaatttgcaagtggagatttcaagcgctttggggccaaaggcagaaaaggaaatatgcttcgtataaaaactagacagaatcattctctgaaactgctctgtgatgtgtgcgttcaactctcagagtttaacttttcttttcattcagcagtttggaaacactctgtttgtaaagtctgcacgtggatattttgactacttagaggccttcgttggaaacgggtttttttcatgtaaggctagacagaagaattcccagtaacttccttgtgttgtgtgcattcaactcacagagatgaacgttcccttagacagagcagatttgaaacactctatttgtgcaatttgcaagtgtagatttcaagcgctttaaggtcaatggcagaaaaggaaatatcttcgtttcaaaactagacagaatcattcccacaaactgcgttgtgatgtgttcgttcaactcacagagtttaacctttcttttcatagagcagttaggaaacactctgttggtaaattctgtaagtggatattctgacatcttgtggccttcgttggaaacgggatttcttcatattctgctagacagaagaattctcagaatcttccttgtgttgtgtgtattcaactcacagagttgaacgatcctttacacagagcagacttgaaacactctttttgtggaatttgcaagttgagatttcagccgctttgaggtccatggtagaaaaggaaatatcttcgtataaaactagacagaatgattctcagaaactcctttgtgatgtgtgtgttcaactcacaaagtttaacctttcttttcatagagcagttagtaaacactctgtttataaagtctgcaagtggatattcagacccctttgagaccttcgttggaaacgggatttcttcatattatgctagacagaagaattctcagtaacttccttgtgttgtgtgttttcaactgacagagttgaacattcatttagagagagcagatttgtaacactgtttttgtggaatttgcaagtggagatttcaagtgctttggggccaaaggcagaaaaggaaatatcttcgtataaaaactagacagaatcattctcagaaactgctgcatgatgtgtgcgttcaactctcagagtttaacttttcttttcattcagcggtttggaaacactctgtttgtaaagtctgcacgtggatattttgaccacttagaggccttccttggaaacgggttttttttcatgtaaggctagacagaagaattctcagtaacttcattgtgttgtgtgtattcaactcacagatttcaacgatcctttacacagagcagacttgaaacactctttttctggtatttgcaagtggagatttcagccgctttgaggtcaatggtagaataggaaatatcttcctatagaaactagacagaatgattctcagaaactcctttgtgatgtgtgcgttcaactcacagagttcaacctttcttttcatagagcagttgggaaacactctgtttgtaaagtctgcaagtggatattcagacttctttgaggccttcgttggaagcgggttttcttcatattctgcttgacagaagaattctcagtaacttccttgtgttgtgtgtattcaactcacagagttgaacgatcctttacacagagcagacttgaaacactctttttgtggaatttgaaagtggagatttcagccgctttgaggtcaatggtagaataggaaatatcttcctatagaaactagacagaatgattctcagaaacttctttgtgatgtgtgcgttcaactcacggagtttaacctttcttttcatagagcagttaggaaacactctgtttgtaaactctgcaagtggatattcagacctctttgaggccttcgttggaaacgggatttcttcatactatgctagacagaagaattcccagtaacttccttgtgttgtgtgtgttcaactcacagagttgaactttcatttacacagagcagatttgaaacactctttttgtggaatttgcaaatggagatttcaagcgctttgaggccaaagacagaaaaggaaatatcttcgtataaaaactagacagaatcattctcagaaactgctctgcgatgtgtgcgttcaactctcagagtttaacttttcttttcattcagcagtgtggaaacactctgtttgtaaactctgcacgtggatattttgaccacttagaggccttcgttggaaacgggtttttttcctgtaaggctagacagaagaattcccagtaacttccttgtgttgtgtgcattcaactcacagagttgaacgttccttagacagagcagatttgaaacactctatttgtgcaatttgcaagtgtagatttcaagcgctttaaggtcaatggcagaaaaggaaatatcttcgtttcaaaactagacagaatcattcccacaaactgcgttgtgatgtgttcgttcaactcacagagtttaccctttcttttcttagagcagttaggaaacagtctgtttgtaaattctgtaagtggttattctgacatcttgtggccttcgttggaaacgggatttcttcatattctgctagacagaagaattctcagtaacttccttgtgttgtgtgtattcaactcacagagttcaccgatcctttacacagagcagacttgtaacactctttttgtggaatttgcaagtggagatttcagccgctttgaagtcaaaggtagaaaagggaatatcttcctataaaaactagacagaatgattctcagaaactcctttgtgatgtgtgcgttcaacacacagagtttaacttttcttttcatagagcggttaggaaacactctgtttgtaaagtctgcaagtggatattcagacctctttgaggccttcgttggaaacgggatttcttcatattctgctagacagaagaattcccagtaacttccttgtgttgtgtgtgttcaactcacagagttgaactttcatttacacagagcagatttgaaacactctttttgtggaatatgcaagtggagatttcaagcgctttgaggccaaaggcagaaaaggaaatatcttcgtataaaaactagacagaatcattctcagagactgctctgtgatgtgtgcgttcaactctcagagtttaacttttcttttcattcagcagtttggaaacactctgtttgtaaagtctgcacgtggataatttgaccacttagaggccttcgttggaaacgggtttttttcatgtaaggctagacagaagaattcccagtaacttccttgtgttgtgtacattcaactcacagagttgaacgttcccttagacagagcagatttgaaacactctttttgtgcaattggcaaatggagatttcaagcgctttaagttcaatggcagaaaaggaaatatcttcgtttcaaaactagacagaatgattctcagaaactcctttgtgatgtgtgcgttcatctcacagagtttaacctttcttttcgtagagcagttaggaaacagtctgtttgtaaattctgtaagtggatattctgacatcttgtggccttcgttggaaacgggatttcttcatattctgctagacagaagaattctcagtaacttccttgtgttgtgtgtattcaactcacagagttgaacgaacctttacacagagcagacttgtaacactctttttgtggaatttgcaattggaattttcagccgctttgaagtcaaaggtagaaaaggaaatatcttcctataaaaactagacagaaatgattctcagaaactcctttgtgatgtgtgcgttcaactcacagagtttaacctttcttttcatagagcagttaggaaacactctgtttgtaaagtctgcaagtggatattcagacctctttgaggccttcgttggaaacgggtttttttcatataaggctagacagaagaattctcagtaacttccttgtgttgtgtgtattcaactgacagagttgaactttcatttagagagagcagatttgaaacactgtttttgtggaatttgcaagtggagatttcaagcgcttttgggccaaaggcagaaaaggaaatatcttcgtataaaaactagacagaatcattctcagaaactgctctgcgatgtgtgcgttcaactctcagagtttaacttttcttttcattcagcagtttggaaacactctgtttgtaaagtctgcacgtggataacttgaccacttagaggccttcgttggaaacgggtttttttcttgtaaggctagacagaagaattcccaggaacttccttgtgttgtgtacattcaactcacagagttgaacgttcccttagacagagcagatttgaaacactctttttgtgcaattggcaagtggtgatttcagccgctttgaggtcaatggtagaaaaggaaatatcttcgtataaaaactagacagaatcattcccacaaactgcgttgtgatgtgttcagttcaactcacagagtttaacctttctgttcatagagcagttaggaaacactctgtttgtaaagtctgtaagtggatattctgacatcttgtggccttcgttggaaacgggatttcttcatattctgctagacagaagaattctcagtaacttccttgtgttgtgtgtattgaactcgcagagttgaacgatcctttacacagagcagacttgaaacactctttttgtggaatttgcaagtggagatttcagccactttgaggtcaatagtagaaaaggaaatatcttcgtagaaaaactagacagaatgattctcagaaaatcttttgtgatgtgtgcgttcaactcacagagtttaacttttcttctcatagagcagttaggaaacactctgtttgtaaagtctgcaagtggatagtggatattcagacctctttgaggtcttcgttggaaacgggatttcttcatattatgctagacagaagaattcccagtaacttccttgtgttgtgggtgttcgactcacagagttgaactttcatttacacagagcagatttgaaacactctttctgtggaatttgcaagtggagatttcaagcgctttgaggccaaaggcagaaaaggaaatatcttcgtttcaaaactagacagaatcattctcagaaactgctctgcgatgtgtgcgttcaactctcagactttaacttttcttttcattcagcaatttggaaacactctgtttgtaaagtctgcacgtggatattttgaccacttagaggccttcgttggaaacgggtttttttcctgtaaggctagacagaagcattcccagtaacttccttgtgttgtgtgcattcaactcacagagatgaacgttcccttagacagagcagatttgagacactctatttgtgcaatttgcaagtgtagatttcaagcgctttaaggtcaatggcagaaaaggaaatatcttcgtttcaaaactagacagaatcattcccacaaactgcgtagtgatgtgttcgttcaacttacagagtttaacctttctgttcatagagcagttaggaaacactctgtttgtaaagtccgtaagtggatattctgacatcttgtggccttgtttggaaaccggacttcttcatatactgctagacagaagaattctcagtaacttccttgtgttgtgtgtattcaactcacagagttgaacgatcctttacacagagcagacttgaaacactctttttgtggaatttgcaagtggagatttcagccgctttgaggtcaatggtagaaaaggaaatatcttcgtagaaaaactagacagaacgattctcagaaactcctttgtgatgtgtgcgttcaactcacagagtttaacttttcttttaatatagcagttaggaaacactctgtttgtaaagtctgcaagtggatattcagacctctttgaggccttcgttggaaacgggatttcttcatattctgttagacagaagaattctcagtaacttcccttgtgttttgtgtattcaactcacagagttgaacgatcctttacacagagcagacttgaaacactctttttgtggaatttgcaagtggagatttcagccgctttcaggtcaatagtagaaaaggaaatatcttcgtagaaaaactagacagaatgattctcagaaactcctttgtgatgtgtgcgttcaactcacagagtttaacctttcttctcatagagcagttaggaaacactctgtttgtaaagtctgcaagtggatattcagacatctttgaggccttcgttggaaacgggatttcttcatgttctgctagacagaagaattctcagtaacttccttgtgttgtgtgtattcaactgacagagttgaactttcatttagagagagcagatttgaaactctgtttttgtggaatttgcaagtggagatttcaagcgctttggggccaaaggcagaaaaggaaatatcttcgtacaaaaactagacagaatcattatcagaaactgctgcgtgatgtgtgcgttcaactctcagagtttaacttttcttttcattcagcggtttggaaacactctgtttgtaaagtctgcacgtggaaattttgaccacttagaggccttcgttggaaacgggtttttttcatgtaaggctagacagaagaattcccagtaacttccttgcgttgtgtacattcaactcacagagttgaacgttcccttagacagagcagatttgaaacactctttttgttcaattggcaagtggagatttcaagcgctttaaggtcaatggcagaaaaggaaatatcttcgtttcaaaactagacagaatcattcccacaaactgcgttgtgatgtgttcgttcatctcacagagtttaacctttcttttcatagagcagttaggaaacagtctgtttgtaaattctgtaagtggatattccgacatcttgtggccttcgttggaaacgggatttcttcatattctgctagacagaagaattctcagtaacttccttgtgttgtgtgtattcaactcacagagttgaacgatcctttacacagagcagacttgaaacactctttgtgtggaatttgcaagtggagatttcagccgctttgaggtcaatagtagaaaaggaaatatcttcgtagaaaaactagacagaatgattctcagaaactcctttgagatgtgtgtgttcaactcacagagtttaacctttcttttcatagagcagttaggaatcactctgtttttaaagtctgcaagtggatattcagacctctttgaggccttcgttggaaaagggtttttttcatataaggctagagagaagaattcccagtaccttccttgtgttgtgtgtgttcaactcacagatttgaactttcatttacacagagcagatttgaaacactctttttgtggaatttgcaaatggagatttcaagcgctttgaggccaaaggcagaaaaggaaatatcttcgtataaaaactagacagaatcattctcagaaactgctgtgtgatgtgtgcgttcaactctcagagtttaacttttcttttcattcagcggtttggaaacactctgtttgtaaagtctgcacgtggatattttgaccacttagaggccttcgttggaaacgggattttttcatgtaaggctagacagaagaattcccagtaacttccttgtgttgtgtacattcaactcacagagttgaacgttcccttagacagagcagatttgaaacactctttttgtgcaattggcaagtggagatttcagccgctttgaagtcaaatgtagaaaaggaaatatcttcctataaaaactagacagaatcattcccacaaactgcgttgtgatgtgtacgttcaactcacagagtttaacctttctgttcatagagcagttaggaaacactctgtttgtaaagtctgtaagtggatattctgacatcttgtggccttcgttggaaacgggatttcttcatattctgctagacagaagaattctcagtaacttccttgtgttgtgtgtattcaactcacagagttgaacgatcctttacacagagcagacttgtaacactctttttgtggaatttgcaagtggagatttcagccgctttgaagtcaaaggtagaaaaaaaatatcttcctataaaaactagacagaatgattctcagaaactcctttgtgatgtgtgccgttcaactcacagagtttaacctttcttttcatagagcagttaggaaacactctgcttgtaaagtctgcaagtggatattcagccctctttgaggccttcgttggaaacgggtttttttcatataaggctagacagaagaattctcagtaacttccttgtgttgtgtgtattcaactgacagagttgaactttcatttagagagagcagatttgaaacactgtttttgtcgaatttccaatggagatttcaagcgctttggggccaaaggcagaaaaggaaatatcttcgtataaaaactagacagaatcattctcagaaactgctctgtgatgtgtgcgttcaactctcagagtttaacttttcttttcattcagcagtttgaaacactctgtttgtaaactctgcacgtggataattggaccacttagaggccttcgttggaaaagggtttttttcctgtcaggctagacagaagaattcccagtaatttccttgtgttgtgtacattcaactcacagagttgaacgttcccttagacagagcagatttgaaacactctttttgtgcaattggcaaatggagatttcaagcgctttaaggtcaatggcagaaaaggaaatatcttcgtttcaaaactagacagaatgattctcagaaactccttagtgatgtgtgcgttcaactcacaaagtttaacctttctgttcatagagcagttaggaaacactctgtttgtaaagtctgcaagtggatattcagacctccttgaggccttcgttggaaacgggatttcttcatattctgctagacagaagaattctcagtaacttccttgtgttgtgtgtattcaactcacagagttgaacgatcctttacacagagcagacttgaagcactctttttgtggaatttgcaagtggagatttcagccgctttgaggtcaatagtagaaaggaaatatcttcgtagaaaaactagacagaatgattctcagaaaatcctttgtgatgtgtgcgttcaactcacagagtttaacttttcttttcatagagcagttaggaaacactctgtttgtaacgtctgcaagtggatattcagacctccttgaggccttcgttggaaacgggatttcttcatattctgctagacagaagaattctcagtaacttccttgtgttgtgtgtattcaactgacagagttgaactttcatttagagagagtagttttgaaacacttttttttgtggaatttgcaagtggagatttcaagcgctttggggccaaaggcagaaaaggaaatatcttcgtataaaaactagacagaatcattctcagaaactgctgcgtgatgtgtgcgttcaactcacagagtttaacttttcttttcattcagcggtttggaaacactctgtttgtaaagtctgcacgtggaaattttgaccacttagaggccttcgttggaaacgggtttttttcatgtaaggctagacagaagaattcccagtaacttccttgtgttgtgtgcattcaactcacagagatgaaagttcccttcgacagagcagatttgaaacactctatttgtgccatttgcaagtgtagatttcaagcgctttaaggtcaatggcagaaaaggaaatatcttcgtttcaaaactagacagaatcattcccacaaactgcgttgtgatgtgttcgttcaactcacagagtttaacctttcttttcatagagcagttaggaaacagtctgtttgtcaattctgtaagtggatattctgacatcttgtggctcttcgttggaaacgggatttcttcatattctgctagacagaagaattcccagtaacttccttgtgttgtgtacattcaactcacagagttgaacgttcccttagacagagcagacttgtaacactctttttgtggaatttgcaagtggagttttcagccgcttttaagtcaatggtagaaaaggtaatatcttcctataaaaactagacagaatgattctcagaaactcctttgtgatgtgtgcgttcaactcacagagttcaacctttcttttcatagagtagttggaaaacactctgtttgtaaagtctgcaagtggatattcagacttctttgaggccttcgttggaagcgggatttcttcatattctgctagacagaagaattctcagtaacttccttgtgttgtgtgtattcaactgacagagttaaactttcatttagagagagcagatttgaaacactgtttttgtggaatttgcaagtggagatttcaagcactttggggccaaaggcagaaaactaaatatcttcgtataaaaactagacagaatcattctcagaaactgctgcatgatgtgtgcgttcaactctcagagtttaacttttcttttcattcagcggtttggaaacactctgtttgtaaagtctgcacttggatattttgaccacttagaagccttcgttggaaacgggtttttttcatataaggctagacagaagaattcccagtaacttccttgtgttgtgtgcattcaactcacagagttgaacgttcccttagacagagcagatttgaaacactctatttgtgcaatttgcaagtgtagatttcaagcgctttaaggtcaacggcagaaaaaggaaatatcttcgtttcaaaactagacagaatcattcccacaaactgcgttgtgatgtgttcgttcaactcacagactttaacctttcttttcatagagcagttaggaaacagtctgtttgtcaattctgtaagtggatattctgtcatcttgtggccttcgttggaaacgggatttcttcatattctgctagacagaagaattctcagtaacttccttgtgttgtgtgtattcaactcacagagttgaacgatcctttacacagagcagacttgtaacactctttttgtggaatttgcaagtggagatttcagccgctttgaagtcaaaggtagaaaaggaaatatcttctctataaaaactagacagaatgattctcagaaactcctttgtgatgtgtgcgttcaactcacagagtttaacttttcttttcatagagcagttaagaaacactctgtttgtaatgtctgcaagtggatattcagacctccttgaggccttctttggaaacgggatttcttcatattctgctagacagaataattctcagtaacttccttgtgttgtgtgtattcaactgacagagttgaactttcatttagagagagcagatttgaaacactgtttttgtggaatttgcaagtggagatttcaagcgctttggggccaaaggcagaaaaggaaatatcttcgtataaaaactagacagaatgattctcagaaactcctttgtgatgtgtgccttcaactcacagagtttaacctttcttttcatagagtagttaggaaacactctgtttgtaaagtctgcaagtggatattcagacctctttgaggccttcgttggaaacgggtttttttcatataaggctagacagaagaattctcagtaacttccttgtgttgtgtacattcaactcacaagagttgaacgttcccttagacagagcagatttgaaacactctttttgtgcaattggcaagtggtgatttcagccgctttgaggtcaatggtagaaaaggaaatatcttcgtataaaaactagacagaatcatccccataaactgcgttgtgatgtgttcgttcaactcacagagtttaacctttcttttcatagagcagttaggaaacagtctgtttgtcaattctgtaagtggatattctgacatcttgtggccttagttggaaacgggatttcttcatattctgctagacagaagaattctcagtaacttccttgtgttgtgtgtattcaactcacagagttgaacgatcctttacacagagcagacttgaaaaactctttttgtggaatttgcaagtggagatttcagccgctttgagttcaatggtagaataggaaatatcttcctatagaaactagacagaatgattctcaaaaactcctttgtgatgtgtacgttcaactcacagagtttaacctttcttttcatagagcagttaggaaacactctgtttgtaaagtctgcaagtggatattcagacctctttgaggccttcgttggaaacgggtttttttcatataaggctagacagaagaattctcagtaacttccttgtgttgtttgtattcaactcacagagttgaactttcatttacacagagcagatttgaaacactctttttgtggaatttgcaaatggagatttcaagcgctttgaggccaaaggcagaaaaggaaatatcttcgtataaaaactagacagaatcattctcagaaactgctctgcgatgtgtgcattcaactctcagagtttaatttttcttttcattcagcagtttggaaacattctctttgtgaagtctgcacgtggatattttgaccacttagaggccttcgttggaaacgggttttattcttgtaaggctagacagaagaattctcagtaacttccttgtgttgtgtgtattcaactcacagagtggaacgatcctttacacagagcagacttgaaacactctttttgtggaatttgcaagtggagatttctgccgctttgaggtcaattgtagaataggaaatatcttcctatagaaactagacagaatgattctcagaaactcatttgtgatgtgtgcgttcaactcacagagtttaacctttcttttcatagagcagttaggaaacactctgtttgtaaagtctgcaagtggatattcagacctctttgtggccttcgttggaaacgggatttcttcatatgatgctagacagaagaattctcagaatcttccttgtgtggtgtgtattcaactcacagagttgaacgatggtttacacagagcagatttgaaacactctttttgtggaatttgcaagtggagatttcagccgctttgaggtcaatggtagaaaaggaaatatcttcgtataaaaactagacagaatgattctcaggaaactcctttgtgatgtgtgtgttcaactcacagagtttaacctttcttttcatagagcagttaggaaacactctgtttgtaaagtctgcaagtggatattcagacctctttgaggccttcgttggaaacgggtttttttcatataaggctagacagaagaattcccagtaacttccttgtgttgtgtgtgttaaactcacagagttgaacttccatttacacagagcagatttgaaacactctttttgtggaatttgcaagtggagatttcaagcgctttgaggccaaaggcagaaaaggaaatatcttcgtttcaaaactagacagataatcattctcagaaactgctctgcgatgtgtgcgttcaactctcagagtttaacttttcttttcattcagcagtttggaaacactctgtttgtaaagtctgcaggtggatattttgaccactcagaggccttcgttggaaacgggtttttttcctgtaaggctagacagaagaattcccagtaacttccttgtgttgtgtgcattcaagtcacagagttgaacgttcccttagacagagcagatttgaaacactctatttgtgcaatctccaagtgtagatttcaagcgctttaaggtcaacggcagaaaagataatatcttcgtttcaaaactagacagaatcattcccacaaactgcgttgtgatgtgttcgttcaactcacagagtttaacctttctgttcatagtgcagttaggaaacactctgtttgtaaagtctgtaagtggatattctgacatcttgtggccttcgttggaaacgggatttcttcatattctgctagacagaagaattctcagtaacttccttgtgttgtgtgtattcaactcacagagttgaacgatcctttacacagagcagacttgaaacactctttttgtggaatttgcaagtggagatttcagccgctttgtggtcaatggtagaaaaggaaatatcttcgtataaaaactagacagaatgattctcagaaactcctttgtgatgtgtgcgttcaactcacagagtttaacctttcttttcatagagcagttaggaaacactctgtttgtaaagtctgcaagtggatattgagacctccttgaggccttcgttggaaacgggatttcttcatattatgctagacagaagaattcccagtaacttccttgtgttgtgtgtgttcaactcacagagttgaactttcatttacacagagcagatttgaaacactctttttgtggaatttgcaggtggagatttcaagccctttgaggccaaaggcagaaaaggaaatatcttcgtataaaaactagacagagtcattctcagaaactgctgcgtgatgtgtgcgttcaactctcagagtttaacttttcttttcattcagcggtttggaaacactctgtttgtaaagtctgcatgtggaaattttgaccatttagaggccttcgttggaaacgggtttttttcatgtaaggctagacagaagaattcccagtaacttccttgtgttgtgtacattcaactcacagagttgaacgttcccttagacagagcatatttgaaacactctttttgtgcaattggcaagtggagatttcaagcgctttaaggtcaatgggagaaaaggaaatatcttcgtttcaaaactagacagaatcattcccacaaactgcgttgtgatgtgttcgttcatctcacagagtttaacctttcttttcatagagcagttaggaaacagtctgtttgtaaattctgtaagtggatattctgacatcttgtggccttcgttggaaacgggatttcttcatattctgctagacggaagaattctcagtaacttccttgtgttgtgtgtattcaactcacagagttgaacgatcctttacacagagcagccttgaaacactctttttgtggaatttgcaagtggagatttcagccgctttgaggtcaatggtagaataggaaatatcttcctatagaaactagacagaatgattctcagaaactcctttgtgatgtgtgtgtccaactcacagagtttaacctttcttttcatagagcagttagtaaacactctgtttataaagtctgcaagtggatattcagacccctttgaggccttcgttggaaacgggatttcttcatattatgctagacagaagaattctcagtaacttccttgtgttgtgtgtgttcaactcacagagttgaactttcatttacccagagcagatttgaaacactctttttgtggaatttgcaagtggagatttcaagcgctttgaggccaaaggcagaaaaggaaatatcttcgtttcaaaactagacagaatcattctcagaaactgctcggcgatgtgtgcattcaactctgagagtttaacttttcttttcattcagcagtttcgaaacactctgtttgtaaagtctgcacgtggatattttgaccacttagaggccttcgttggaaacgggtttttttcatgtaaggctagacagaagaatttcctgtaagttccttgtgttgcgtgcattcaactcacagagttgaacgttcccttagacagagcagatttgaaacactctttttgtgcaattggcaagtggagatttcaagcgatttaaggtcaatggcagaaaacgatataccttcatttcaaaactagacagaaatcattcccacaaactgcgttgtgatgtgttcgttcaactcacagagtttaacctttctgttcatagagcagttaggaaacactctgtttgtaaagtctgtaagtggatattctgacatcttgtggcctttgttggaaacgggatttcttcatattctgctagacagaagaattctcagtaacttacttgtgttgtgtgtgttcaactcacagagttcaacgatcctttacacagagcagacttgaaacactctttttgtggaatttgcaagtggagatttcagccgctttgaggtcaatggtagaaaaggaaatatcttcgtataaaaactagacagaatgattctcagaaactcctttgtgatgtgtgcgttcaactcacagagtttaacctttcttttcatagagcagttgggaaacactctgtttgtaacgtctgcaagtggatattcagacatccttgaggctttcgttggaaacgggatttcttcatattctgctagaaagaagaattcccagtaacatccttgtgttgtgtgtgttcaactcacaaagttgaactttcatttacacagagcagatttgaaacactctttttgtggaatttgcaaatggagatttcaagcgctttgaggccaaaggcagaaaaggaaatatcttcgtataaaaactagacagaaatcattctcagaaactgctctgcgatgtgtgcgttcaactctcaggagtttaacttttcttttcattcagcagtttggaaacactctgtttgtaaagtctgcacgtggatattttgaccacttagaggccttcgttggaaacgggtttttttcctgtaaggctagacagaataattcccagtaacttccttgtgttgtgtacattcaactcacagagttgaacgttcccttagacagagcagatttgaaacactctttttgtgaaattggcaagtggagatttcaagcgctttaaggtcaatggcagaaaaggaaatatcttcgtttcaaaactagacagaatgattctcagaaactcctttgtgatgtgtgcgttcaactcacagagtttaacctttctgttcatagagcagttgggaaacactctgtttgtaaagtctgcaagtggatattcagacctctttgaggccttcgttggaaacgggatttcttcatattctgctagacagaagaattctcagtaacttcccttgtgttgtgtgtattcaactcacagagttgaatgatcctttacacagaacagacttgaaacactctttttgtggaatttgcaagtggagatttcagccgctttgaggtcaatggtagaataggaaatatcttcctatagaaactagacagaatgattctcagaaactcctttgtgatgtgtgcgttcaactcacagagtttaacctttgttttcatagagcagttaggaaacactctgtttgtaatgtctgcaagtggatattcagacatctttgaggctttcgttgtaaacgggatttcttcatattctgctatacagaagaattcccagtaacttcccttgtgttgtgtgtgttcaactcacagagttgaactttcatttacacagagcagatttgaaacactctttttgtggaatttgcaagtggagatttcaagggctttgaggccaaaggcagaaaaggaaatgtcttcgtttcaaaactagacagaatcattctcagaaactgctctgcgatgtgtgcgttcaactctcagagtttaacttttcttttcattcagcagtttggaaacactctggttgtaaagtctgcacgtggatattttgaccacttagaggccttcgttggaaacgggtttttttcctgtaaggctagacaaaagaattcccagtaacttcctcgtgttgtgtgcattcaactcacagagttgaacgttcccttagacagagcagatttgaaacactctatttgtgcaattggcaagtgtagatttcaagcgctttaaggtcaatggcagaaaaggaaatatcttcgtttcaaaactagacagaatcattcccacaaactgcgttgtgatgtgttcgttcaactcacagagtttaacctttccgttcatagagcagttaggaaacactctgtttgtaaagtctgaaagtggatattctgacatcttgtggccttcgttggaaacgggatttcttcatattctgctagacagaataattctcagtaacttctttgtgttgtgtttattcagctgacagagttgaacgatcctttacagagagcagacttgaaacactctttttgtggaatttgcaagtggagatttcagccgctttgaggtcaatggtagaataggaaatatcttcctatagaaactagacagaatgattctcagaaactcctttgtgatgtgtgcgttcaactcacagagtttaacctttcttttcatagagcagttaggaaacactctgtttgtaaagtctgcaagtggatattcagacctctttgaggccttcgttggaaaagggtttttttcatataaggctagacagaagaattctcagtaacttccttgtgttgtgtgtattcaactgacagagtttaactttcatttagagagagcagatttgaaaacctgtttttgtggaatttgcaagtggagatttcaagcgctttggggccaaaggcagaaaaggaaatatcttcgtataaaaactaaacggaattattctcagaaactcctttgtgatgtgtgcgttcaactcacagaatttaacctttcttttcatagagcagttaggaaacactctgtttgtaaagactgcaagtggatattcagacctctttgaggccttcgttggaaacgggtttttttcctgtaaggctagacagaagaattcccagtaacttccttgtgttgtgtacattcaactcacagagttgaacgttcccttagacagagcagatttgaaacactctttttgtgcaattggcaagtggagatttcaagcgctttaaggtcaatggcagaaaaggaaatatcttcgtttcaaaacaagacagaatcattcccacaaactgcgttgtgatgtgttcgttcaactcacagagtttaacctttcttttcatagagcagttaggaaacagtctgtttgtaaattttgtaagtggatattctgacatcttgtggccttcgttggaaacgggatttcttcatattctgctagacagaagaattctcagtaacttccttgtgttgtgtgtattcaactcacagagttgaaggatcctgtacacagagcagtcttgaaacactctttttgtggaatttgcaagtggagatttcagccgctttgaggtcaatagtagaaaaggaaatatcttcgtagaaaaactacacagaatgattctcagaaactcctttgtgatgtgtgcgttcaactcacagagtttaacctttcttttcatagagcagttaggaaacactctgtttgtaaggtctgcaagtggatattcagacatctttgaggctttcgttgcaaacgggttttcttcatattctgctacacagaagaattctcagaaacttccttgtgttgtgtgatttcaactcacagagttgaacgatgctttacacagagtagacttgaaacactctttttgtggaatttgcaagtggagatttcagccgctttgtggtcaatggttgaaaaggaaatatcttcgtataaaaactagacagaatgattctccgaaactcctttgtgatgtgtgcgtacaactcacagagtttaacctttcttttcatagagcagttaggaaacactctgtttgtaaagtctgcaagtggatattcagacctctttgaggccttcgttggaaacgggatttcttcatattctgctagacagaagaattcccagtaacttgccttgtgttgtgtacattcaactcacagagttgaacgttcccttagacagagcagatttgaaacactctttttgtgcaattggcaaatggagatttcaagcgctttaaggtcaatggcagaaaaggaaattgttcgtttcaaaactagacagaatcattcccacaaactgcgttgtgatgtgttcgttcaactcacagagtttaacatttctgttcatagagcagttaggaaacactctgtttgtaaagtctgtatgtggatattctgacatcttgtggccttcgttggaaacgggatttcttcatattctgctagacagaagaattctcagtaacatctttgtgttgtgtgtattcaactcacagagttgaacgatcctttacacagagcagacttgaaacactctttttgtggaatttgcaagtggagatttcagccgctttgaggtcaatggtagaataggaaatatcttcctatagaaactagacagaatgattctcagaaactcctttgtgatgtgtgcgttcaactcacagagtttaacctttcttttcatagagcagttaggaaacactctgtttctaaagtctgcaagtggatattcagccctctttgaggccttcgttggaaacgggtttttttcatataaggctagagagaagaattcccagtaacttccttgtgttgtgtgtgttcaactcacagagttgaactttcatttacacagagcagatttgaaacactctttttgtggaatttgcaagtggagatttcaagcgctttgaggccaaaggcagaaaaggaaatatcttcgtagaaaaactaggcagaaatcattctcagaaactgctctgcgatgtgtgcgttcaactctcaggagtttaacttttcttttcattcagcagtttggaaacactctgtttgtaaagtctgcacgtggatattttgaccacttagaggccttcgttggaaacgggtttttttcctgtaaggctagacagaagaattcccagtaacttccttgtgttgtgtacattcaactcacagagttgaacgttcccttagacagagcagatttgaaacactctttttgtgcaattggcaagtggagatttcaagcgctttaaggtcaatggcagaaaaggaaatatcttcgtttcaaaactagacagtatcattcccacaaactgcgttgtgatgtgttcgttcaactcacagagtttaacctttctgttcatagagcagttaggtaacactctgtttgtaaagtctgccagtggatattcggacctccttgaggccttcgttggaaacgggatttcttcatattctgctagacagaagagttctcagtaacttttttgtgttgtgtgtattcaactcacagagttgaaccttgctttagagagagcagatttgaaacactctttttgtggaatttgcaagtggagatttcagccgctttgagttcaatggtagaataggaaatatcttcctatagaaactagacagaatgattctcagaaactcctttgtgatgtgtgcgttcaactcacagagtttaacctttcttttcatagagcagttaggaaacactctgtttgtaaagtctgcaagtggatattcagacctctttgaggccttcgttggaaacgggatttcttcatattctgctagacacaagaattctcagaaacttccttgtgttgtgtgttttcaactcacagagttgaacgatcctttacacagagcagacttgaaacactctttttgtggaatttgcaagtggagatttcagccgctttgaggtcaatggtagaataggaaatattttcctatagaaactagacagaatgattctcagaaactcctttgtgatgtgtgcgttcaactcacagagtttaacctttcttttcatagagcagttaggaaacactctgtttgtaaagactgcaagtggatattcagacctccttgaggccttcgttggaaacaggatttcttcatattatgctagacagaagaattctcagtaacttccttgtgttgtgtgtattcaactcacagagttgaacaatcctttacacagagcagacttgaaacactctttttgtggaatttgcaagtggagatttcagccgctttgaggtcaatggtagaataggaaatatcttcctatagaaactagacagaatcattctcagaaactgctctgcgatgtgtgcgtacaactctcagactttaacttttcttttcattcagcagtttggaaacactctgtttgtaaagtctgcacgtggataatttgaccacttagaggccttcgttggaaacgggtttttttcatgtaaggctagacagaagaattcccagtaacttccttgtgttgtgtgcattcaactcacagagttgaacgtttccttagacagagcagaattgaaacactctatttgtgcaatttgcaagtgtagatttcaagcgctttaaggtcaatggcagaaaaggaaatatcttcgtttcaaaactagacagaatcattcccacaaactgcgttgtgatgtgttcgttcaactcacagagtttaacctttcttttcatagagcagttaggaaacagtctgtttgtcaattctgtaagtggatattctgacatcttgtggccttcgttggaaacggggtttcttcatattctcctagacagaagaattctcagtaacttccttgtgttgtgtgtattcaactcacagagttgaacgatcctttacacagagcagattagaaacacttcttttgtggaatttgcaagtggagatttcagccgcgttgaggtcaatggtagaaaaggaaatatcttcgtataaaaactagacagaatgattctgagaaactcctttgtgatgtgtgcgttcaactcacagagtttaacctttcttttcatagagcagttaggaaacactctgtttgtaaagtctgcaagtggatattcagatctccttgaggccttctttggaaacgggatttcttcatattatgctagacagaagaattcccagtaacttccttgtgttgtgtgtgtagaactcacagagttgaactttcatttagacagagcagatttgaaacactctttttgtggaatttgcaaatggagaattcatgcactttgaggccaaaggcagaaaaggaaatatcttcgtataaaaactagacagaatcattctcagaaactgcggcgtgatgtgtgcgttcaactctcagagtttaacttttcttttcattcagcggtttggaaacactctgtttgtaaagtctgcacgtggatattttgaccacttagaggccttcgttggaaacgggtttttttcatgtaaggctagacagaagaattcccagtaacttccttgtgttgtgtacattcaactcacagagttgaacgttcccttagacagagcagatttgaaacactctttttgtgcaatttgcaagtggtgatttcagccgctttgaggtcaatggtagaaaaggaaatatcttcgtataaaaactagacagaatcattcccacaaactgcgttgtgatgtgttcgttcaactcacagagtttaacctttcttttcatagagcagttaggaaacagtctgtttgtaaattctgtaagtggatattctgacatcttgtggcgttcgttggaaacgggatttcttcatattctgctagacagaagaattctcagtaacttccttgtgttgtgtgtattcaactcacagagttggacgatcctttacacagagcagacttgaaacactctttttgtggaatttgcaagtggagatttcagccgctttgaggtcaatagtagaaaaggaaatatcttcgtagaaaaactagacagaatgattctcagaaacttctttgtgatgtgtgtgttcaactcacagagtttaacctttcttttcatagagcagttagtaaacactctgtttataaagtctgcaagtggatattcagacccctttgaggccttcgttggaaacgggatttcttcatattatgctagacagaacaattcccagtaacttccttgggttgtgtgtgttcaactcacagagttgaactttcatttacacagagcagatttgaaacactctttttgtggaatttgcaagtggagatttcaagcgctttgaggccaaaggcagaaaaggaaatatcttcgtataaaaactagacagaatcattctcagaaactgctctgcgatgtgtgcgttcaactctcagagtttaacttttcttttcattcagcagtttggaaacactctgtttgtaaagtctgcacgtggataatttgacaacttagaggccttctttggaaacgggtttttttcatgtaaggctagacagaagaattcccagtaacttccttgtgttgtgtacattcaactcacagagttgaacgttcccttagacagagcagatttgaaacactctttttgtgcaattggcaagtggtgatttcagccgctttgaggtcaatggtagaaaaggaaatatcttcgtataaaaactagacagaatgattctcagaaacttctttgtgatgtgtgcgttcaactcacagagtttaacctttcttttcacagagcagttaggaaacactctgtttgtaaactctgcaagtggatattcagacctctttgaggccttcgttggtaacgggatttcttcatactatgctagacagaagaattctcagtaacttccttgtgttgtgtgtattcaactcacagagttgaacgatcctttacacagagcagacttgtaacactctttttgtggaatttgcaagtggagatttcagccgctttgaagtcaaaggtagaaaaggaaatatcttcctataaaaactagacagaatgattctcagaaacttcattgtgatgtgtgcgttcaactcacagagtttaacctttcttttcatagagcagttaggaaacaccgtttgtaaactctgcaagtggatattcagacctctttgaggccttcgttggaaacgggatttcttcatactgtgctagacagaagaattctcagtaacttctttgtgttgtgtgtattcaactgacagagttgaactttcatttagagagagcagatttgaaacactgtttttgtggaatttgcaagtggagatttcaagcgctttggggccaaaggcagaaaaggaaatatcttcgtataaaaactagacagaatcattctcagaaactgctgcgtgatgtgtgcgttcaactctcagagtttaacttttcttttcattcagcggtttggaaacactctgtttgtaaagtctgcacgtggatattttgaccacttagaggccttctttggaaacgggtttttttcaagtaaggctagacagaagaattcccagtaacttccttgtgttgtgtgcattcaactcacagatttgaacgttccctagacggagcagatttgaaacactctatttgtgcaatttgcaagtgtagatttcaagcgctttaaggtcaatggcagaaaagggaatatcttcgtttcaaaactagacagaatcattcccacaaactgcgttgtgatgtgttcgttcaactcacagagtttaacctttctgttcatagagcagtgaggaaacactctgtttgtaaagtctgtaagtgggtattctgacatcttgtggccttcgttggaaacgggatttcttcatattctgctagacagaagaattctgagtaacttccttgtgttgtgtgtattcaactcacagagttcaacgatcctttacacagagcagactagaaacacccttttgtggaatttgcaagtggagatttcagccgctttgaggtcaattgtagaaaaggaaatatcttcgtataaaaactagacagaatgattgtcagaaactcctttgtgctgtgtgcgttcaactcacagagtttaaactttcttttcatagagcagttaggaaacactctgtttgtaaagtctgcaggtggatattcagacatcattgaggctttcgttggaaacgggatttcttcatattctgctagacagaagaattctcagtaacttccttgtgttgtgtgtattcaactgacacagttgaactttcatttagagagagcagatttgaaacactgtttttgtggaatttgcaagtggagatttcaagcgctttggggccaaaggcagaaaaggaaatatcttcgtataaaaactagacagaatgattctcagaaactcctttgtgatgtgggcgttcaactcacagagtttaacctttcttttcatagagccgttaggaaacactctgtttgtaaattctgcacgtggatatttggacttcttagaggccttcgttggaaacgggtttttttcatgtaaggctagacggaagaattcccagtaacttccttgcgttgtgtacattcaactcacagagttgaacgttcccttagacagagcagatttgaaacactctttttgtgcaattggcaagtggagatttcaagcgctttaaggtcaatggcagaaaaggaaatatcttcgtttcaaaactagacagaatcactcccacaaactgcgttgtgatgtgttcgttcaactcacagagtttaacctttcttttcatagagcagttaggaaacagtctgtttgtaaattctgtaagtggatattctgacatcttgtggccttcgttggaaacgggatttcttcatattctgctagacagaagaattctcagtaacttccttgtgttgtgtgtattcaactcacagtagttgaacgatcctttacacagagcagacttgaaacactctttttgtggaatttgcaaggggagatttcagccgctttgagttcaatggtagaataggaaatatcttcctatagaaactagacagagtgattctcagaaacttctttgtgatgtctgcgttcaactcacagagtttaacctttcttttcatagagcagttaggaaacactctgtttgtaaagtctgcaagtggatagtcagacctccttgaggccttcgttggaaacgggatttcttcatattctgctatacagaagaattctcagtaacttccttgtgttgtttgtattcaactgacagagttgaactttcatttacagagagcagatttgaaacactgtttttgtggaatttgcaagtggagatttcaagcgctttttggccaaaggcagaaaacgaaatatcttcgtataaaaactagacagaatcattctcagaaactgctgcgtgatgtgtgcgttcaactctcagagtttaacttttcttttcattcagcggttctgaaacactctgtttgtaaagtctgcacgtggatattttgaccacttagaggccttcgttggaaacgggtttttttcatgtaaggctaggcagaagaattcccagtaacttccttgtgttgtgtgcattcaactcacagagttgaacgttccttagacagagcagatttgaaacactctatttgtgcaatttgcaagtgtagatttcaagcgctttaaggtcaatggcagaaaaggaaatatcttcgtttcaaaactagacagaatcattcccacaaactgcgttgtgatgtgttcgttcaactcacagtgtttaacctttccgttcatagagcagttaggaaacactctgtttgtaaagtctataagtggatattctgacatcttgtggccttcgttggaaacgggatttcttcatattctgctagacagaagaattctcagtaacttccttgtgttgtgtgtattcaactcacagagttgaacgatcctttacacagagcagacttgaaacactctttttgtggaatttgcaagtggagatttcagccgctgtgagttcaatggtagaataggaaatatcttcctatagaaactagacagaatgattctcagaaactcctttgtgatgtgtgtgttcaactcacagagtttaacctttcttttcatagagcagttaggaaacactctgtttgtaaagtctgcaagtggatattcagacctctttgaggccttcgttggaaacgggatttcttcatattctgctagacagaagaattcccagtaacttccttgtgttgtgtgtgttcaactcacagagttgaactttcatttacacagagcagatttgaaatactctttttgtggaatttgcaagtggagatttcaagcgctttgaggccaaaggcagaaaaggaaatatcttcgtataaaaactagacagaatcattctcagaaactgctctgcgatgtgtgcgttcaactctcagagtttaacttttcttttcattcagcagtttgtaaacactctgtttgtaaagtctgcacgtggatattttgaccacttagaggcctttgttggaaacgggtttttttcctgtaaggctagacagaagaattcccaggaacttccttgcgttgtgtacattcaactcacagagttgaacgttcccttagacagagcagatttgaaacactctttttgtgcaattggcaagtggagatttcaagcgctttaaggtcaatggcagaaaaggaaatatcttcgtttcaaaactagacagaatcattctcagaaactgctgcgtgatgtgtgcgttcaactctcagagtttaacttttcttttcattcagcggtttggaaacactctgtttgtaaagtctgtaagtggatattctgacatcttgtggccttcgttggaaacgggatttcttcatattctgctagacagaagaattctcagtaccttccttgttttgtgtgtattcaactcacagagttgaacgatcctttacgcagagcagacttgaaacactctttttgtggaatttgcaagtggagatttcagccgctttgaggtcaatggtagaaaaggaaatatcttcgtataaagactagacagaatgattctcagaaactcctttgtgatgtgtgcgtttaactcacagagtttaacctttcttttcatagagcagttaggaaacactctgtttgtaaagtctgcaagtggatattcagacatccttgaggctttcgttggaaacgggatttcttcatattctgccagaaagaagaattcccagtaacttccttgtgttgtgtgtgttcaactcacagagttgaactttcatttacacagagcagatttgaaacactctttttgtggaatttgcaagtggagatttcaagcgctttgaggccaaagcagaaaaggaaatatcttcgtttgaaaactagacagaatcattctcagaaactgctctgcgatgtgtgcgttcaactctcagagtttaacttttcttttcattcagcagtttggaaacactctgtttgtaaagtctgcacgtggataacttgaccacttagaggccttcgttggaaacgggtttttttcatgtaaggctagacagaagaattcccagtgacatccttgtgttgtgtgcattcaactcacagagttgaacgttcccttagacagagcagatttgaaacactctatttgtgcaatttgcaagtgtagatttcaagcgctttaacgtcaatggcagaaaaggaaatatcttcgttttaaaactagacagaatcattcccacaaactgcattgtgatgtgttcgttcaactcacagagtttaacctttctgttcatagagcagttaggaaacactctgtttgtaaagtctgcaagtggatattcagacctctttgaggccttcgttggaaacgggatttcttcatattctgctagacagaagaattctcagtaacttccttgtgttgtgtgtattcaactcacagagttgaaggatcctttacagagagcaggcttgaaacactctttttgtcgaatttgcaagtggagatttcagccgctttgaggtcaatggtagaatagggaatatcttcttatagaaactagacagaatgattctcagaaactcctttgtgatgtgtgtgttcaactcacagagtttaacctttcttttcatagagcagttagtaaacactctgtttataaagtctgcaagtggatattcagacccctttgaggccttcgttggaaatgggatttcttcatattatgctagacagaagaattctcagtaactttccttgtgttgtgtgtattcaactgacagagttgaactttcatttagagagagcagatttgaaacactctttttgtggaatttgcaagtggagatttcaagcgctttggggccaaaggcagaaaaggaaatatcttcgtataaaaactagacagaatcattctcagaaactgctctgtgatgtgtgcgttcaactctcagagtttaacttttcttttcattcagcagtttggaaacaatctgtttgtaaagtctgcacgtggatattttgaccacttagaggccttcgttggaaacgggtttctttcctgtaagggtagacagaagaattcccagtaacttccttgtgttgtgtgcattcaactcacagagttgaacgttcccttagacagagcagatttgaaacactctatttgtgcaatttgcaagtgtagttttcaagctctttaaggtcaacggcagaaaaggaaatatcttggtttcaaaactagacagaatcattcccacaaactgcgttgtgatgtgttcgttcaactcacagagtttaacctttctgttcatagagcagttaggaaacaatctgtttgtaaagtctgcaagtggatattcagacctccttgaggccttcgttggaaacgggatttcatcatattatgctagacagaagaattctcagtaacttccttgtgttgtgtgaattcacctcacagagttgaacgatcgtttacacagagcagacttgaaacactctttttgtggaatttgcaagtggagatttcagccgctttgtggtcaatagtagaataggaaatatcttcctatagaaactagacagaatgattctcagaaagtcctttgtgatgtgtgcgttcaactcacagagtttaacctttctgttcatagagcagttaggaaacactctgtttgtaaagtctgcaagtggatattcagacctccttgaggccttcgttggaaacgggatttcttcatattctgctagacagaagaattcccagtaacttccttgtgttgtgtgtgttcaactcacagagttgaactttcatttacacagagcagatttgaaacactctttctgtggaatttgcaagtggagatttcaagcgctttgaggccaaaggcagaaaaggaaatatcttcgtttcaaaactagacagaatcattctcagaaactgctctgcgatgtgtgcgttcaactctcagagtttaacttttcttttcattcagcagtttggaaacactctgtttgtaaagtctgcacgtggatattttgaccatttagagaccttcgttggaaacgggtttttttcttgtaaggctagacagaagaattcccagtaacttccttgtgttgtgtacattcaactcacagagttgaacgttcccttagacagagcagatttgaaacactctttttgtgcaattggcaaatggagatttccagcgctttaaggtcaatggcagaaaaggaaatatcttcgtttcaaaactagacagaaaatcattcccacaaactgcgttgtgatgtgttcgttcaactcacagagtttaacctttctgttcatagagcagttaggaaacactctgtttgtaaagtctgtaagtggatattctgacatcttgtggccttcgttggaaacgggatttcttcatattctgctagacagaagaattcccagtaacttcccttgtgttgtgtgtgttcaactcacagagttgaactttcatttacacagagcagatttgaaacactctttttgtggaatttgcaaatggagatttcagccgcgttgaggccaatggtagaaaaggaaatatcttcgtttcaaaactagacagaatgattctcagaaactcctttgtgatgtgtgtgttcaactcacagattttaacctttcttttcatagagcagttaggaaacactctgtttgtaaagtctgcaagtggatattcagacctctttgaggccttcgttggaaacgggtttttttcatataaggctagacagaagaattctcagtaacttccttgtgttgtgtgtattcaactcacagaattgaacgatcctttacacagagcagacttgaaacactctttttgtggaatttgcatgtggagatttcagccgctttgaggtcaatggtagaaaaggaaatatcttcctatagaaactagacagaatgattctgagaaactcctttgtgatgtgtgcgttcaactcacagagtttaacctttcttttcacagagcagttaggaaacactctgtttgtaaagtctgcaagtggatattcagacctccttgaggccttcgttggaaacgggatttcttcatattatgctagacagaagaattcccagtaacttctttgtgttgtgtgcattcaactcacagagttgaacgttcccttagacagagcagattggaaacactctatttgtgcaatttgcaagtgtagatttcaagcgctttaaggtcaacggcagaaaaggaaatatcttcgtttcaaaactagacagaatcattcccacaaactgcgttgtgatgtgttcgttcaactcacacagtttaacctttctgttcatagagcagttaggaaacactctgtttgtaaagtctctaagtggatactctgacatcttgtggccttcgttggaaacgggatttcttcatattctgctagacagaagaattctcagaaacttccttgtgttgtgtgttttcaactcacagagttgaatgatcctttacacagagtagacttgaaacactctttttgtggaatttgcaagtggagatttcagccgctttgaagtcaatggtagaaaaggaaatatcttcgtataaaaactagacagaatgattctcagaaactcctttgtgatgtgtgcgttcaactcacagagtttaacctttcttttcttagagcagttaggaaacactctgtttgtaaagtctgcaagtggatattcagacctctttgaggccttcgttggaaacgggtttttttcatataaggctagacagaagaattctcagtaacttccttgtgttatgtgtattcaactgacagagttgaactttcatttagagagagcagatttgaaacactgtttttgtggaatttgcaagtggagatttcaagcgctttggggccaaaggcagaaaaggaaatatcttcgtatgaaaactagacacaatcattctcagaaactgctctgcgatgtgtgcgttcaactctcagagtttaacttttcttttcattcagcagtgtggaaacactctgtttgtaaagtctgcacgtggatattttgaccacttagaggccttcgttggaaacgggtttttttcctgtcaggctagacagaagaattcccagtaacttccttgtgttgtgtgcattcaactcacagagttgaacgttcccttagacagagcagatttgaaacactctatttgtgcaatttgcaagtgtagatttgaagcgctttcaggtcaatggcagaaaaggaaatatcttcgtttcaaaactagacagaatgattcccacaaactgcgttgtgatgtgttcgttcaactcacagagtttaacctttctgttcatagagcagttaggaaacactctgtttgtaaagtctgtaagtggatattctgacatcttgtggccttcgttggaaacgggatttcttcatattctgctagacagaagaattctcagtaacttaccttgtgttgtgtttattcaactcacagagttgaatgatcctttacacagagcagacttgaaacactctttttgtggaatttgcaagtggagatttcagccgctttgaagtcaatggtagaaaagtaaatatcttcgtataaagacaagacagaatgattttcagaaactgctttgtgatgtgtgcgttcaactcacagagtttcaactttcttttcatagagcagttaggaaacactctgtttgtaaagtctacaagtggatattcagacctctttgaggccttcgttggaaacgggatttctttatattatgctagacagaagaattcccagtaacttccttgtgttgtgtgtgttcaactcacagagttgaactttcatttacacagagcagatttgaaacactctttttgtggaatttgcaagtggagatttcaagcgctttgaggccaaaggcagaaaaggaaatatcttcgtataaaaagtagacagaatcattctcagaaactgctctgcgatgtgtgcgttcaactctcagagtttaacttttcttttcattcagcagtttggaaacagtctgtttgtaaagtctgcacgtggatattttgaccacttagaggccttcgttggaaacggttttctttcctgtaaggctatacagaagaattcccagtaacttccttgtgttgtgtgcattcaactcacagagttgaacgttcccttaaacagagcagatttgaaacactctttttgtgcaattggcaagtggagatttcaagcgctttaaggtcaatggcagaaaaggaaatatcttcgtttcaaaactagacagaatcattcccacaaactgcgttgtgatgtgttcgttcaactcacagagtttaacatttcttttcatagagcagttaggaaacagtctgtttgtaaattctgtaagtggatattctgacatcttgtggccttcgttggaaacgggatatcttcacattctgctagacagaagaattctcagtaacttccttgtgttgtgtgtattcaactcagagagttgaacgatcctttacacagagcagacttgtaacactctttttgtggaatttgcaagtggagatttcagccgctttgaagtcaaaggtagaaaaggaaatatcttcctataaaaactagacagaatgattctcagaaactcctttgtgatgtgtgtgttcaactcacagagtttaaccattcttttcatagagcagttagtaaacactcagtttataaagtctgcaaatggatattcagacccctttgaggccttcgttggaaacgggatttcttcatattatgctagaaagaagaattcccagtaacttccttgtgttgtgtgtgttcaactcacagagttgaactttcatttacacagagcagatttgaaacactctttgtggaatttgcaagtggagatttcaagcgctttgaggccaaaggcagaaaaggaaatatcttcgtataaaaactagacagaatgattctcagaaacttcattgtgatgtgtgcgttcaactcacagagtttaacctttcttttcatagagcagttaggaaacactctgtttgtaaactctgcaagtggatattcagacctcctttgaggccttcgttggaaacgggatttcttcatactgtgctagacagaagaattcgcagtaacttccttgtgttgtgtgtattcaactgacagagttgaacttacatttagacagagcagattagaaaaactctttatgtggaattttcaagtggagatttcaagcgcgttgaggccaaaggcagaaaaggaaatatcttcgtataaaaactagacagaatcattccctcaaactgcgttgtgatgtgttcgatcaactcacggagtttaacctttcttttcatacagcagttaggaaacactctgtttgtaaagtctgtaagtggatatgctgacatcttgtggccttcgttggaaacgagatgtcttcatattctgctagacagaagaattctcagaatcttccttgtgttgtgtgtattcaactcacagagttgaacgatccctttacacagagcagacttgaaacactctttttgtggaatttgcaagtggagatttcagccgctttgaggtccatggtagaaaaggaaatatcttcgtataaaaactagacagaatgattctcagaaactcctttgtgatgtgtgcgttcaactcacagagtttaacctttcttttcatagagcagttaggaaacactctgtttgtaaagtctgcaagtggatattcagacatctttgaggccttcgttggaaacgggatttcttcatgttctgctagacacaagaattctcagtatcttccttgtgttgtgtgtgttcaactcacagagttgaactttgatttacacagagcagatttgaaacactctttttgtggaatttgcaagtggagatttcaagcgctttgaggccaaaggcagaaaaggaaatatcttcgtctaaaaactagacagaatcattctcagaaactgctctgcgatgtgtgcgttcaactctcagagtttaacttttcttttcattcagcagtttggaaacactctgtttgtaaagtctgcacgtggataatttgaccacttagaggccttctttggaaaagggtttttttcatataaggctagacagaagaattcccagtaacttccttgtgttgtggacattcaactcacagagttgaacgttcccttagacagaacagatttgaaacactctttttgagcaattggcaagtggtgatttcagccgctttgaggtcaatggtagaaaaggaaatatcttcgtataaaaactagacagaatcattcccacaaactgcgttgtgatgtgttcgttcaactcacagagtttaacctttcttttcatagagtagttaggaaacagtctgtttgaaaattctgtaagtagatattctgacagcttgtggccttcgttggaaacgggatttctttatattctgctagacagaataattctcagtaacttccttgtgttgtgtgtattcaactcacagagttgaaggatcctttacagagagcaggcttgaaacactctttttgtcgaatttgcaagtggagatttcagccgctttgtggtcaatggtagaataggaaatatcttcttatagaaactagacagaatgattctcataaactcctttgtgatgtgtgcgttcaactcacagagtttaacttttcttttcacagagcagttaggaaacactctgtttgtaaagtctgcaagtggatattcagacctctttggggccttcgttggaaacgggatttcttcatattctgctagacagaataattctcagtaacttccttgtgttgtgtgtattcaactcacagagttgaacgatcctttacacagagcggacttgaaacattctttttgtggaatttgcaagtggagatttcagccgctttgaggtcaatggtagaataggaaatatcttcctatagaaactagacagaatcattctcagaaactgctctgcgatgtgtgcgttcaactctcagagtttaacatttcttttcattcagcagtttggaaacactctgtttgtaaagtctgcacgtggatattttgaccacttagaggccttcgttggaaacgggtttttttcctgtaaggctagacagaagcattcccagtaacttccttgtgttgtgtgcattcaactcacagagatgaacgttcccttagacagagcagatttgaaacgctctatttgcgcaatttgcaagtgtagatttcaagcgctttaaggtcaatggcagaaaaggaaatatcttcgtttcaaaactagacagaatgattctcagaaactcctttgtgatgtgtgcgttcaactcacagagtttaacctttcttttcatagagcagttgggaaacactctgtttgtaaagtctgcaagtggatattcagacatccttgaggctttctttggaaaagggatttcttcatattctgctagaaagaagaattctcagtaacttccttgtgttgtgtgtattcaactcacagagttgaacgatcctttacacagagcggacttgaaacacactttttgtggaatttgcaagtggagatttcagccgcgttgaggtcaatggtagaaaaggaaatatcttcgtataagaactagacagaatgattctcagaaactcctttgtgatgtgtgcgttcaactcacagagtttaacctttcttttcatagagcagttaggaaacactctgtttgtaaagtctgcaagtggatattcagacctccttgaggccttcgttggaaacggttttttttcatataaggctagacagaagaattcccagtaacttccttgtgttgtgtgtgttcaactcacagagttgaactttcatttacacagagcagatttgagacactctttttgtggaatttgctaatggagatttcaagcgctttgaggccaaaggctgaaaaggaaatatcttcgtataaaaactagacagaatcattctcagaaactgctgcgtgatgagtgcgttcaactctcagagtttaacttttcttttcattcagcggtttggaaacactctgtttgtaaagtctgcacgtggataatttgaccacttagaggccttcgttggaaacgggattttttcatgtaaggctagacagaagaattcccagtaacttccttgtgttgtgtgcattcaactcacagatttgaacgttcccttagacagagcagatttgaaacactctatttgtgcaattggcaagtgcagatttcaagcgctttaaggtcaatggcagaaaaggaaatatcttcgtttcaaaactagacagaatcattcccacaaactgcgttgtgatgtgttcgctcaactcacagagtttaacctttttcttcatagagcagttaggaaacactctgtttgtaaagtctgtaagtggatattctgtcatcttttggccttcgttggaaacgggatttcttcatattctgctagacagaagaattctcagaatcttccttgtgttgtgtgtattcaactcacagagttgaacgatcctttacacacagcagacttgaaacactctttttgtggaatttgcaagtggagatttcagccgctttgaggtccatggtagaaaaggaaatatcttcgtataaaaactagacagaatgattctcagaaagtcctttgtgatgtgtgttttcaactcacagagtttaacctttcttttcatagagcagttagtaaacactctgtttataaagtctgcaagtggatattcagacccctttgaggccttcgttggaaacgggatttcttcatattatgctagacagaagaattctcagtaacttccttgtgttgtgtgtattcaactgacagagttgaactttcatttagggagagcagatttgaaacactgtttttgtggaatttgcaagtggagatttcaagcgctttggggccaaaggcagaaaaggaaatatcttcgtagaaaaactagacagaatcattctcagaaactgctctgtgatgtgtgcgttcaactctcagagtttaacttttcttttcattcagcagtttggaaacactctgtttgtaaagtctgcacgtggatattttgaccacttagaggccttcgttggaaacgggtttttttcatgtaaggatagacagaagaattcccagtaacttccttgtgttgtgtacattcaactcacagagttgaacgttcccttagacagagcagatttgaaacactctttttgtgcaattggcaactggagatttcaagcgctttaaggtcaatggcagaaaaggaaatatcttcgtttcaaaactagacagaatcattctcagaaactgctctgcgatgtgtgcgttcaactctcagagtttaacttttcttttcattcagcagtttggaaacactctgtttgtaatgtctgcacgtggatattttgaccacttagaggccttcgttggaaacgggtttctttcctgtaaggctagacagaagaattcccagtaacttccttgtgttgtgtgcattcaactcacagagttgaacgttcccttagacagagcagatttgaaacactctatttgtgcaatttgcaagtgtagatttcaagcgctttaaggtcaatggcagaaaaggaaatatcttcgtataaaaactagacaggatgattctcataaactcctttgtgatgtgtgcggtcaactcacagagtttaacctttcttttcatagagcagttaggaaacactctgtttgtaaagtctgcaagaggatattcagacctctttgaggctttctttggaaacgggatttcttcatattctgctagacagaagaattctcagtaacttccttgtgttgtgtgtattcaactgacagagttgaactttcatttagagagagcagatttgaaacactgtttttgtggaatttgcaattggagatttcaagagctttggggccaaatgcagaaaaggaaatatcttcgtataaacactagacagaatcattctcagaaactgctctgcgatgtgtacgttcaactctcagagtttaacttttcttttcattcagcagtttggaaacactctgtttgtaaagtctgcacgtggatattttgaccacttagaggccttcgttggaaacgggtttttttcctgtaaggctagacagaagaattcccactaacttccttgtgttgtgtacattcaactcacagagttgaacgttcccttagacagagcagattggaaacactctttttgtgcaattggcaaatggagatttcaagcgctttaaggtcaatggcagaaaaggaaatatcttcgtttcaaaactagacagaatcattcccagaaactgcgttgtgatgtgttcgttcaactcacagagtttaacctttcttttcatagagcagttaggaaacagtctgtttgtcaattctgtaagtggatattctgacatcttgtggccttccttggaaacgggatttcttcatattctgctagacagaagaattctcagtaacttccttgtgttgtgtgtattcaactcacagagttgaaggatcctttacagagagcaggcttgaaacactctttttgtcgaatttgcaagtggagatttcagccgctttgaggtcaatggtagaataggaaatatcttcttatagaaaatagacagaatgattctcataaactcctttgtgatgtgtgcgttcaactcacagagtttaacctttcttttcatagagcagttaggaaacactctgtttctaaagtctgcaagtggatattcagacctccttgaggccttcgttggaaacgggatttcttcatattctgctagacagaagaattctcagtaacttccttgggttgtgtgtattcaactcacagagttgaacgatcctttacacagagcagacttgtaacactctttttgtggaatttgcaagtggagatttcagccgctttgaagtcaaaggtagaaaaggaaatatcttcctataaaaactagacagaatgattctcagaaactcctttgtgatgtgtgcgttcaactcacagagtttaacctttcttttcatagagcagttaggaaacgctctgtttgtaaagtctgcaagtggatattcagacatctttgaggctttcgttagaaacgggatttcttcatattctgctagacagaagaattctcagtaacttccttgtgttgtgtgtattcaactgacagagttgaactttcatttagagagagcagatttgaaacactgtttttgtggaatttgcaagtggagatttcaagagctttggggccaaaggcagaaaaggaaatatcttcgtataaaaactagacagaatcattctcagaaactactctgcgatgtgtgcgttcaactctcagagtttaacttttcttttcattcagcagtttggaaacactctgtttgtaaagtctgcacgtggataatttgaccacttagaggccttcgttggaaacgggtttttttcatgtaaggctagacagaagaattcccagtaacttccttgtgttgtgtacattcaactcacagagttgaacgttcccttagacagagcagatttgaaacactctttttgtgcaattggcaagtggacatttcaagcgctttgaggtcaatggcagaaaaggaaatatcttcgtttcaaaactagacagaatcattcccacaaactgcgttgtgatgtgttcgttcaactcacagagtttaacctttctgttcatagagcagttaggaaacactctgtttgtaaagtctgtaagtggagattctgacatcttgtggccttcgttggaaacgggatttcttcatattctgctagacagaagaattctcagtaacttccttgtgttgtgtgtattcaactctcagagttgaacgatcctttactgagagcagacttgaaacacactttttgtgcaatttgcaagtggagatttcagccgctttgaggtcaatggtagaataggaaatatcttcctatagaaactagacagaatgattctcagaaactcctttgtgatgtgtgcgttcaactcacagagtttaacctttcttttcatagagcggttaggaaacactctgtttgtaaagtctgcaagtggatattcagacctctttgaggccttcgttggaaacgggatttcttcatattctgctagagagaagaattctcagtaacttccttgtgttgtgtgtattcaactgacagagttgaactttcatttagagagagcagatttgaaacactgtttttgtggaatttgcaagtggagatttcaagcgctttgtgtccaaaggcagaaaacgaaatatcttcgtataaaaactagacagaatcattctcagaaactgctgcgtgatgtgtgcgttcaactctcagagtttaacttttcttttcattcagcggtttggaaacactctgtctgtaaagtctgcacgtggatattttgaccacttagaggccttcgttggaaacgtgttttttgcatgtaaggctagacagaagaattcccagtaacttcattgtgttgtgtgcattcaactcacagagttgaacgttcccttagacagagcagatttgaaacactctatttgtgcaatttgcaagtgtagatttcaagcgctttaaggtcaatggcagaaaaggaaatatcttcgtttcaaaactagacagaatcattcccacaaactgcgttgtgatgtgttcgttcaactcacagagtttaacctttctgttcatagagcagttaggaaacactctgtttgtaaagtctgtaagtggatattctgacatcttgtggccttcgttggaaacgggatttcttcatattatgctacacagaataattctcagtaacttccttgtgttctgtgtattcaactcacagagttgaacgatcctttacagagagcagacttgaaacactctttttgtggaatttgcaagtggagatttcagccgctttgaggtcaatggtagaaaaggaaatatcttcgtataaagactagacagaatgattctcagaatctcctttgtaatgtgtgcgttcaactcacagagtttaacctttcttttcatagagcagttaggaaacactctgtttgtaaagtctgcaagtggatattcagacctctttgaggccttcgttggaaacgggatttcttcatattctgctagacagaagaattcccagtaacttccttgtgttgtgtgtgttctacccccagagttgaactttgatttacacagagcagatttgaaacactctttttgtggaatttgcaagtggagatttcaagcgctttgaggccaaaggcagaaaaggaaatatcttcgtataaaaactagacagaatcattctcagaaactgctctgcgatgtgtgcgttcaactctcagagtttaactttgcttttcattcagcagtttggaaacactctgtttgtaaagtctgctcgtggataatttgaccatttagaggccttcgttggaaacgggtttttttcatgtaaggctagacagaagaattcccagtaacttccttgtgttctgtacattcaactcacagagttgaacgttcccttagacagagcagatttgaaacactctttttgtgcaattggcaaatggagatttcaagcgctttaaggtcaatggcagaaaaggaaatatcttcgtttcaaaactagacagaatcattcccacaaactgcgttgtgatgtgttcgtttaactcacagagtttaacctttcttttcatagagcagttaggaaacactctgttggtaaattctgtaagtggatattctgacatcttgtggccttcgttggaaacgggatttcttcatattctgctagatagaagaattctcagaaacgtccttgtgttgtgtgtattcaactcacagagttgaacgatcctttacacagagcagacttgaaacactctttttgtggaatttgcaagtggagatttcagccgctttgaggtcaatggtagaaaaggaaatatcttcgtatagaaacaagacagaatgattctcagaaactcctttgtgatgtgtgcgttcaactcacagagtttaacctttcttttcatagagcagttaggaaacactctgtttgtaaagtctgcaagtggatattcagacatctttgaggccttcgttggaaacgggatttcttcatattatgctagacagaagaattcccagtaacttccttgtgttgtgtgtgttcaactcatagagttgaactttcatttacacagagcagatttgaaacactctttttgtggaatttgcaaatggagatttcagccgcgttgaggtcaatggtagaaaaggaaatatcttcgtttcaaaactagacagaatcattctcagaaactgctctgcgatgtgtgcgttcaactctcagagtttaacttttcttttcattcagcagtttggaaacactctgtttgtaaagtctgcacgtggataacttgaccacttagaggccttcgttggaaacgggtttttttcatgtaaggctagacagaagaattcccagtaacttccttgtgttgtgtgcgttcaactcacagagttgaacgttcccttagacagagcagatttgaaacactctatttgtgcaatttgcaagtgtagttttcaagctctttaaggtcaacggcagaaaaggaaatatcttcgtttcaaaactagacagaatgattctcagaaactcctttgtgatgtgtgcgttcaactcacagagttttacctttctattcatagagcagttaggaaacactctgtttgtaaagtctgcaagtggatattcagacctccttgaggccttcgttggaaacgggatttcttcatattctgctagacagaagaattctcagtaacttccttgtgttgtgtttattcaactcacagagttgaaggatcctttacacagagcagacttgaaacactctttttgtggaatttgcaagtggagatttcagccgctttgaggtcaatggtagaaaagtaaatatcttcgtataaagactagacagaatgattctcagaaactcctttgtgatgtgtgcgttcaactcacagagtttaacctttcttttcatagagcagttaggaaacactctgtttgtaaagtctgcaagtggatattcacacctccttgaggccttcgttggaaacgggatttcttcatattctgctagacagaagaattctcagtaacttccttgtgttgtgtgtattcaactgacagagttgaactttcatttagagagagcagatttgaaacactgtttttgtggaatttgcaagtggagatttcaagcgctttggggccaaaggcagaaaagggaatatcttcgtataaaaactagacagaatcattctcagaaactgctgcgtgatgtatgcgttcaactctcagagtttaacttttcttttcattgagcggtttggaaacactgtgtttgtaaagtctgcacgtggatattttgaccacttagaggccttcgttggaaacggaattttttttgtaaggctagacagaagaattcccagtaacttccttgtgttgtgtacattcaactcacagagttgaacgttcccttagacagagcagacttgtaacactctttttgtggaatttgcaagtggagatttcagccgctttgaagtgaaaggtagaaaaggaaatatcttcctataaaaactagacagaatcattcccacaaactgcgttgtgatgtgttcgttcaactcacagagtttaacctttctgttcatagagcagttaggaaacactctgtttgtaaagtctgtaagtggatattctgacatcttgtggccttcgttggcaacgggatttcttcatattctgctagacagaagaattctcagtaacttccttgtgttgtgtgtattcaactcacagagttgaacgatcctttacacagagcagacttgtaacactctttttgtggaatttgcaagtggagatttcagccgctttgaggtccatggtagaaaaggaaatatcttcgtataaaaactagacagaatgattctcagaaactcctttgtgatgtgtgcgttcaactcacacagtttaacctttcttttcatagagcagttgggaaacactctgtttgtaaagtctgcaagtggatattcagacctccttgaggccttctttggaaacgggatttcttcatattatgctagacagaagaattctcagtaacttccttgtgttgtgtgtattcaactcacagagttgaacgatcctttacacagagcagacttgaaacactctttttgtggaatttgcaagtggatatttcagccgctttgaagtcaatggtagaataggaaatatcttcctatagaaactagacagaatcattctcagaaactgctctgcgatgtgtgcgttcaactctcagagtttaacttttcttttcattcagcagtttggaaacactctgtttgtaaagtctgcacgtggatattttgaccacttagtggccttcgttggaaacgggtttttttcctgtaaggctagacagaagaattcccagtaacttccttgtgttgtgtgcattcaactcacagagttgaacgttcccttagacagagcagatttgaaacactctatttgtgcaatttgcaagtgtagatttcaagcgctttaaagtcaatggcagaaaaggaaatatctttgtttcaaaactagacagaatcattcccacaaactgcgttgtgatgtgttcgttcaactcacagagtttaacctttcttttcatagagcagttaggaaacagtctgtttgaaaattctgtaaggggatattctgacatcttgtggccttcgttggaaacgggatttcttcatattctgctagacagaagaattctcagtaacttccttgtgttgtgtgtattcaactcacagagttgaacgatcctttacacagagcagacttgaaacactctttttgtggaatttgcaagtggagatttcagccgctttgaggtccatggtagaaaaggaaatatcttcgtataaagactagacagatagattctcagaaactcctttgtgatgtgtgcgttcaactcacagagtttaacctttcttttcatagagcagttaggaaacactctgtttgtaaagtctgcaagtgtatattcagacctctttgaggccttcgttggaaacgggtttctttcatataaggctagacagaaggattcccagtaacttccttgtgttgtgtgtgttcaactcacagagttgaactttcatttacaaagagcagatttgaaacactcttttagtggaatttgcaattggagatttcaagcgctttgaggccaaaggcagaaaaggaaatatcttcgtataaaaactagacagaatcattctcagaaactgctctgcgatgtgtgcgttcaactctcagactttaacttttcttttcattcagcagtttggaaacactctgtttgtaaagtctgcacgtggataatttgaccgcttggaggccttcgttggaaacgggtttttttcctgtaaggctagacagaagaattcccagtaacttccttgtgttgtgtgcattcaactcacagagttgaacgttcccttacacagagcagatttgaaacactctgtgcaatttccaagtgtagatttcaagcgctttaaggtcaacggcagaaaaggaaatatcttcgtttcaaaactagacagaatcattcccacaaactgcgttgtgatgtgttcgctcaactcacagagtttaacctttctgttcatagagcagttaggaaacactctgtttgtaaagtctgtaagtggatattctgacatcttgtggccttcgttggaaacgggatttcttcatattctgctagacagaagaattctcagtaacttccttgtgttgtgtgtattcaactcacagagttgaacgatcctttacacagagcagacttgaaacactctttttgtggaatttgcaagtggagatatcagccgctttgaggtcaatggtagaataggaaatatcttcctatagaaactagacagaatgattctcagaaactcctttgtgatgtgtgcgttcaactcacatagtttaacttttcttttcatagagcagttaggaaacactctgtttgtaaagtctgcaagtggatattcagacctctttgaggccttcgttggaaacgggatttcttcatattatgctagacagaagaattcccagtaacatccttgtgttgtgtgtgttcaactcacagagttgaactttcatttacacagagcagatttgaaacactctttttgtggaatttgcaaatggagatttcaagcgctttgaggccaaaggcagaaaaggaaatatcttcgtaaaaaaactagacagaatcattctcagaaactgctctgcgatgcgtgcgttcaactctcagagtttaacttttcttttcattcagcagtttggaaacactctgtttgtaaagtctgcacgtggataatttgaccacttagaggcctttgttggaaacgggtttttttcctgtaaggctagacagaagaattcccagtaacttccttgtgttgtgtacattcaactcacagagttgaacgttcccttagacagagcagatttgaaacactctttttgtgcaattggcaagtggagatttcaagcgctttatggtcaatggcagaaaaggaaatatcttcgtttcaaaactagagagaatgattctcagaaacttctttgtgatgtgtgcgttcacctcacagagtttaacctttcttttcatagagcagttaggaaacactttgtttgtaaagtctgcaagtggatattcagacctgtttgaggccttcgttggaaacgggatttcttcatactatgctagacagaagaattctcagtaacttccttgtgttgtgtgtattcagctcacagggttgaacgatcctttatacagagcagacttgaaacactctttttgtgggacttgcaagtggagatttcagccgctttgaggtcaataatagaaaaggaaatatcttcgtagaaaaactagacagaatgattctcagaaactcctttgagatgtgtgtgttctactcacagagtttaacctttcttttcatagagcagttaggaatcactctgtttgtaaagtctgcaagtggatattcagacctctttgaggccttcgttggaaacgggtttttttcatataaggctagacagaagaattctcagtaacttccttgtgttgtgtgtattcaagtgacagaggtgaactttcatttagagagagcagatttgaaacactgtttttgtggaatttgcaagtggagatttcaagcgctttggggccaaaggcagaaaaggaaatatcttcgtataaaaactagacagaatcattctcagaaactgctctgtgatgtgtgcgttcaactctcagagtttaacttttcttttcattcagcagtttggaaacactctgtttgtaaagtctgcacgtggatattttgaccacttagaggccttcgttagaaacgggtttttttcatgtaaggctagacagaagaattcccagtaacttccttgtgttgtgtgcattcaactcacagagttgaaccgttcccttagacagagcagatttgaaacactctatttgtgcaatttgcaagtgtagttttcaagctctttaaggtcaacggcagaaaaggaaatatcttcgtttcaaaactagacagaatcattcccacaaactgcgttgtgatgtgttcgttcaactcacagagtttaacctttcttttcatagagcagttaggaaacactctgttggtaaattctgtaagtggatattctgacatcttgtggcctccgttggaaacgggatttcttcatattctgctagacagaagaattctcagaaacttccttgtgttctgtttatttaactcacagagtcgaacgatcctttactcagagcagacttgaaacactccatttgtggaatttgcaagtggagatttcagccgctttgaggtcaatggtagaataggaaatatcttcctatggaaactagacagaatgattctcagaaactcctttgtgctgtgtgcgttcagctcacagagtttaacctttcttttcatagagcagttaggaaacactctgtttgtaaagtctgcaagtggatattcagacatctttgaggctttcgttggaaacgggatttcttcatattctgctagacagaagaattctcagaaacttccttgtgttgtgtgttttcaactcacagagttcaacgatccattacacagagaagacttgaaacactctttttgtggaattggcaagtggagatttcagccgctttgaggtcaatggtagaaaaggaaatatcttcgtataaaaactagacagaatcattctcagaaactgctctgcgatgtgtgcgttcaactctcagagtttaacttttcttttcattcagcagtttggaaacactctgtttgtaaagtctgcacgtagatattttgaccacttagaggccttcgttggaaacgggtttttttcctgtaaggctagacagaagaattcccagtaacttccttgtgttgtgtacattcaactcacagatttgaacgttcccttagacagagcagatttgaaacactctttttgtgcaattggcaagtggagatttcaagagttttaaggtcaatggccgaaaaggaaatatcttcgtttcaaaactagacagaatcattcccacaaactgcgttgtgatgtgttcgttcaaatcacagagtttaacctttcttttcatagagcagttaggaaacactctgtttgtaaattctgtaagtggatattctgacatcttgtggccttctttggaaacgggatttcttcatattctgctagacagaagaattctcagtaacttccttgtgttgtgtgtattcaactcacagagttgaacgatcctttacacagagcagacttgaaacactctttttgtggaatttgcaagtggagatttcagccgctttgaggtcaatggtagaaaaggaaactatcttcatataaagacaagacagaatgattctcagaaactcctttttgctgtgtgcgttcagctcacagagtttaacctttcttttcatagagcagttaggaaacactctgtttgtaaagtctgcaagtggatattcagacatctttgaggcttttgttggaaacgggatttcttcatattctgctagacagaagaattcccagtaacttccttgtgttgtgtgtgttcgactcacagatttgaactttcatttacacagagcagatttgaaacactctttttgtgggatttgcaaatggagatttcaagcgctttgaggccaaaggcagaaaaggaaatatcttcgtataaaaactagacagaatcattctcagaaactgctctgcgatgtgtgcgttcaactctcagagtttaacttttcttttcattcagcagtttggaaacactctgtttgtaaagtctgcacgtggataacttgaccacttagaggccttcgttggaaacgggtttttttcatgtaaggctagacagaagaattcccagtaacttccttgtgttgtgtacattcaactcacagagttgaacgttcccttagacagagcagatttgaaacactctttttgtgcaattgggaagtggagatttcaagcgctttaaggtcaatggcagtaaaggaaatatcttcgtttcaaaactagacagaatcattcccacaaactgcgttgtgatgtgttcgttcaactcacagatgtttaacctttcttttcatagagcagttaggaaacagtctgtttgtaaattctgtaagtggatattctgacatcttgtggccttcgttggaaacgggatttcttcatattctgctagacagaagaattctcagtaacttccttgtgttgtgtgtattcaactcacagagttgaacgatcgtttacacagagcagacttgaaacactctttttgtggaatttgcaagtggagatttcagccgctttgaggtcaatggtagaaaaggaaatatcttcgtataaagactagacagaatgattctcagaaactcctttgtgatgtgtgaattcaactcacagagtttaacctttcttttcacagagcagttaggaaacactctgtttgtaaaatctgcaagtggatattcagacctccttgaggccttcgttggaaacgggatttcttcatattatgctagacagaagaattcccagtaacttccttgtgttgtgtgtgttcaactcacggagttgaactttcatttacacagagcagatttgaaacactctttttgtggaatttgcaagtggagatttcaagcgctttgaggccaaaggcagaaaaggaaatatcttcgtttgaaaactacacagaaatcattctcagaaactgctgcgtgatgtgtgcgttcaacactcagagtttaacttttcttttcattcagcggtttggaaacactctgtttgtaaagtctgcacgtggataatttgaccacttagaggccttcgttggaaacgggattttttcatgtaaggctagacagaagaattcccagtaacttccttgtgttgtgtgcattcaactcaaagagttgaacgttcccttagacagagcagatttgaaacactctatttgtgcaatttgcaagtgtagatttcaagcgctttaaggtcaatggcagaaaaggaaatatcttcgtttcaaaactagacagaatcattcccacaaactgcgttgtgatgtgttcgttcaactcacagagtttaacctttctgttcatagagcagttaggaaacactctgtttgtaaagtctgtaagtggatattctgacatcttgtggccttcgttggaaatgggatttcatcatattctgctagacagaagaattctcagtaacttccttgtgttgtgtttattcaactcacagagttgaatgatcctttacacagagcagactttaaacactctttttgtggaatttgcaagtggagatttcagccgctttgaggtcaatggtagaaaaggaaatatcttcgtataaagactagacagaatgattgtcagaaactcctttgtgatgtgtgcgttcaactcacagagtttaacctttcttttcatagagcagttaggaaacactgtgttgttaaagtctgcaagtggatattcagacctccttgaggccttcgttggaaatgggatttcttcatattctgctagacagaagaattctcagtaacttccttgtgttgtgtgtattcaactcacagagttgaactttcatttagagagagcagatttgaaacactgtttttgtggaatttgcaagaggacatttcacgcgctttggggccaagggcagaaaaggaaatatcttcgtataaaaactagacagaatcattttcagaaactgctgcgtgatgtgtgcgttcaactctcagagtttaacttttcttttcattcagcggtttggaaacagtctgtttgtaaagtctgcacgtggatattttgaccacttagaggccttcgttggaaacgggttttttgcatgaaaggttagacagaagaattctcagtaacttccttgtgttgtgtgtattcaactcacagagttgaacgatactttacacagagcagatttgaaacactctatttgtgcaatttgcaagtgtagttttcaagctctttaaggtcaacggcagaaaaggaaatatcttggtttcaaaactagacagaatcattcccacaaactgcgttgtgatgtgttcgttcaaatcacagagtttaacttttcttttcatagagctgttaggaaacagtctgtttgtaaattctgtaagtggatattctgacatcttgtggccttcgttggaaacgggatttcttcatattctgctagacagaataattctcagtaacttccttatgttgtgtgtattcaactcacagagttgaacgatcctttacacagagcagacttgaaacactctttttgtggaatttgcaagtggagatttcagccgctttgaggtcaatggtagaataggaaatatcttcctatagaaactagacagaatgattctcacaaactcctttgtgatgtgtgcgttcaactcacagagttaaacctttcttttcatagagcagttaggaaacactctgtttgtaaagtctgcaagtggatattcagacctccttgaggccttcgttggaaaggggatttcttcatattatgctagacagaataattctcagtaacttccttgtgttgtgtgtattcaactgacagagttgaactatcatttagagagtgcagatttgaaacactgtttttgtggaatttgtaagtggagatttcaagcgctttggggccaaaggcagaaaaggaaatatcttcgtataaaaactagacagaatcattctcagaaactgctgcgtgatgtgtgcgttcaactctcagagtttaacttttcttttcattcagcggtttggaaacactctgtttgtaaagtctgcacgtggatatattgaccacttagaggccttcgttggaaacgggttttttgcatgtaaggctagacagaagaattcccagtaatttccttgtgttgtgtgcattcaactcacagagttgaacgttcccttagacagagcagatttgaaacactctatttgtgcaatttggaagtgtagatttcaagcgctttaaggtcaatggcagaaaaggaaatatcttcgtttcaaaactagacagaatcattcccacaaactgcgttgtgatgtgttcgttcaacccacagagtttaacctttctgttcatagagcagttaggaaacactctgtttgtaaagtatgaaagtggatattctgacatccttgtggccttcgttggaaacgggatttcttcatattctgctagacagaagaattctcagtaacttccttgtgttgtgtgtattcaactgacagagttgaactttcatttacacagagcggacttgaaacactctttttgtggaatttgcaattggagatttcagccgcgttgaggtcaatggtagaaaaggaaatctcttcgtataaaaactagacagaatgattcacagaaaatcttttgtgatgtgtgcgttcaactcacagagtttaacttttcttctcatggagcagttaggaaacactctgtttgtaaagtctgcaagtggatattcagacccctttgaggccttcgttggaaacgggatttcttcatattctgctagacagaagaattctcagtaacttccttgtgttgtgtgtattcaactgacagagttgaactttcatttagacagagcagatttgaaacactctttttgtggaatttgcaaaggtagatttcatgcgctttgaggccaaaggcagaaaaggaaatatcttcgtataaaaactagacagaatcatgctcagaaactgctctgcgatgtgtgcgttcaactctcagagtttaacttttcttttcattcagcagtttggaaacactctgtttgtcaagtctgcacgtgcataatttgaccgcttagaggccttcgttggaaacgggtttttttcatgtaaggctagacagaagaattcccagtaacttccttgtgttgtgtgcattcaactcacagagttgaacgttcccttagacagagcagatttgaaacagcctatttgtgcaatttgcaagtgtagatttcaagcgctttaaggtcaacggcagaaaaggaaatatcttcctttcaaaactagacagaatgattctcagaaactcctttgtgatgtgtgcgttcaactcacagagtttaacttttcttttcatagagcagttaggaaacactctgtttgtaaagtctgcaagtggatattgagacctctttgaggccttcgttggaaacgggatttcttcatattatgctagacagaataattctcagtaactttccttgtgttgtgtgtattcaactcacagagttgaacgatcctttacagagagcagacttgaaacactctttttgtggaattcgcaagtggagatttcagccgctttgaggtcaatggtagaaaaggaaatgtcttcgtataaagactagacagaatgattcccataaactcctttgtgatgtgtgcgttcaactcacagagtctaacctttctgttcatagagcagttaggaaacactctgtttgtaaagtctgcaagtggatattcagacctccttgaggccttcgttggaaacgggatttcttcatattctgctagacagaagaattcccagtaacttccttgtgttgtgtgtgttcaactcacagaattgaactttcatttacacagagcagatttgaaacactctttttgtggaatttgcaaatggagatttcaagcgctttgaggccaaaggcagaaaaggaaatatcttcgtttcaaaactagacagaatcattctcagaaactgctgcgtgatgtgtgcgttcaactctcagagtttaacttttcttttcattcagcggtttggaaacactctgtttgtgaagtctgcccgtggatattttgaccccttagaggccttcgttggaaacgggtttttttcatgtaaggctagacagaagaattcccagtaacttccttgtgttgtgtgcattcaactcacagagatgaaagatcccttagacagagcagatttgaaacactctatttgtgccatttgcaagtgtagatttcaagcgctttaaggtcaatggcagaaaaggaaatatcttcgtttcaaaactagacagaatcattcccacaaactgcgttgtgatgtgttcgttcaactcacagagtttaacctttctgttcatagagcagttaggaaacactctgtttgtaaagtctgtaagtggatattctgacatcttgtggccttcgttggaaacgggatttcttcatattgtgctagacagaagaattctcagtaacttccttgtgttgtgtgtattcaactcacagagttgaacgatcctttacacagagtagacttgaaacactctttttgtggaatttgcaagtggagatttcagccgctttgaggtcaatggtagaataggaaatatcttcctatagaaactagacagaatgattctcagaaactcctttgtgatgtgtgcgttcaactcacagagtttaacttttcttttcatagagccgttaggaaacactctgtttgtaaagtctgcaagtggatattcagacctctttgaggccttcgttggaaacgggatttcttcatattatgcgtagacagaagaattctcagtaacttccttgtgttgtgtgtattcagctgacagagttgaactttcatttagagagagcagatttgaaacactgtttttgtgtaatttgcaattggagatttcaagcgctttggggccaaacgcagaaaaggaaatatcttcgtataaaaactagacagaatcattctcagaaactgctgtgcgatgtatgcgttcaactctcagagtttaacttttcttttcattcagcagtttggaaacactctgtttgtaaagtctgcacgtggatattttgaccacttagaggccttcgttggaaacgggtttttttcatgtaaggctagacagaagaattcccagtaacttccttgtgttgtgtacattcaactcacagagttgaacgttcccttagacagagcagatttgaaacactctttttgtgaaattggcaagtggagatttcaagcgctttaaggtcaatggcagaaaaggaaataccttcgtttcaaaactagacagaatgattctcagaaactcgtttgtgatgtgtgcgttcaactcacagagtttaacctttcttttcatagagcagttaggaaacactctctaaagtctgcaagtggatattcagacctccttgaggtcttcgttggaaacgggatttcttcatattctgctagacagaagaattctcagtaacttccttgtgttgtgtttattcaactcacagagttgaatgatcctttacacagagcagacttgaaacactctttttgtggaatttgcaagtggagatttcagccgatttgaggtcaatggtataaaagtaaatatcttcgtataaagactagacagaatgattctcagaaactcctttgtgatgtgtgcgttcaactcacagagtttaacctttcttttcatcgagcagttaggaaacactctgtttgtaaagtctgcaagtggatattcagacctctttgaggccatcgttggaaacgggatttcttcatattctgctagagagaggaattctcagtaacttccttgtgttgtgtgtattcaactgacagagttgaactttcttttagagagagcagatttgaaacactgtttttgtggaatttgcaactggagatttcaagcgctttggggccaaaggcagaaaaggaaatatcttcgtataaaaactagacagaatcattctcagaaactgctctgcgatgtgtgcgttcaactctcagagtttaacttttcttttcattcagcagtttggaaacactctgtttgtaaggtctgcaagtggatattcagacctctttgtggccttctttggaaacgggtttttttcatataaggctagacagaagaattcccagtaacttccttgtgttgtgtgcattcaactcacagagttgaacgttcccttagacagagcagatttgaaacactctatttgcgcaatttgcaagtgtagatttcaagcgctttaaggtcaatggcagaaaaggaaatatcttcgtttcaaaactagacagaatcattcccacaaactgcgttgtgatgtgttcgttcaactcacagagtttaacctttcttttcatagagcagttaggaaacactctgtttataaactctgcaagtggatattcagacctctttgaggcctttgttggaaacgggatttcttcatactatgctagacagaagaattctcagaaacctccttgtgttgtgtgtattcaactcacagagttcaatgacgctttacacagagcagacttgaaacactctttttgtggaatttgcaagtggagatttcagccgctttgaggtcaatggtagaataggaaatatcttcctatagaaactagacagaatgattctcagaaactcctttgtgatgtgtgcgttcaactcacagagtttaacctttcttttcatagagctgttaggaaacactctgtttgtaatgtctgcaagtggatattcagacatccttgaggctttcgttggaaacgggatttcttcatattctgctagaaagaagaattctcaggaacttccttgtgttgtgtgtattcaactcagagagttcaacgatcctttacacagagcagacttgaaacactctttttgtggaatttgcaagtggagatttcagccgctttgaggtcaattgtagaaaaggaaatatcttcgtataaaaactagacagaatgattctcagaaactcctttgtgatgtgtgcgttcaactcacagagtttaccctttcttttcatagagcagttaggaaacactctgtttgtaaagtctgcaagtggatattcagacctccttgatgccttcgttggaaacgggatttcttcatattattgtagacagaagaattctcaataacttccttgtgttgtgtgtattcaactcacagagttgaacgatcctttacacagagcagacttgaaacactctttttgtggaatttgcaagtggagatttcagccgctttgaggtcaatggtagaataggaaatatcttcctatagaaactagacagaatcattctcagaaactgctgcgtgatgtgtgcgttcaactctcagagtttaacttttcttttcattcagcggtttggaaacactctgtttgtaaagtctgcacgtggatattttgaccacttagaggccttcgttggaaacgggattttttcatgtaaggctagacagaagaattcccagtaacttccttgtgttgtgtgcattcaactcacagagttgaacgttcccttagacagagcagatttgaaacactctatttgtgcaatttgcaagtgtagatttcaagcgctttaaggtcaacggcagaaaaggaaatatcttcgtttcaaaactatacagaatcattcccacaaactgcgttgtgatgtgttcgttcaactcacagagtttaacctttcagttcatagagcagttaggaaacactctgtttgtaaagtctgtaagtggatattctgacatcttgtggccttcgttggaaacgggatttcttcatattctgcaagacagaagaattctcagtaacttccttgtgttgtgtgtattcaactcacagagttgaacgatcctttacacagagcagacttgaaacactctttttgtggaatttgcaattggagatttcagccgctttgaggtcaatagtagaaaaggaaatatcttcgtagaaaaactagacagaatgattctcagaaactcctttgtgatgtgtgtgttcacctcacagagtttaacctttcttttcatagagcagttagtaaacactctgtttataaagtctgcaactggatattcagacccctttgaggccttcattggaaacgggatttcttcatattatgctagacagaagaattctcagtaatttccttgtgttgtgtgtattcaactcacagagttgaacgatcctttacacagagcagacttgaaacactctttttgtggaatttgcaagtggagatttcagccgcattgggttcaatggtagaataggaaatatcttcctatagaaactagacagaatgattctcagaaactcctttgtgatgtgtgcgttcaactcacagagtttaacctttcttttcatagagcagttaggaaacactctgtttgtaaagtcagcaagtggatattcagacctctttgaggccttcgttggaaacgggatttcttcatattctgctagacagaagaattcccagtaacttccttgtgttgtgtgtgttcaactcacagagttgaactttcatttacacagagcagattggaaacactctttttgtggaatttgcaagtggagatttcaagcgctttgaggccaaaggcagaaaaggaaatatcttcgtataaaaactagacagaatcattctcagaaactgctgtgcgatgtgtgcgtttaactctcagagtttaacttttcttttcattcagcagtttggaaactctctctttgtaaagtctgcacgtggataacttgaccacttagaggccttcgttggaaacgggtttttttcatgtaaggctagacagaagaattcccagtaacttccttgtgttgtggacattcaactcacagagttgaacgttcccttagacagaacagatttgaaacactctttttgtgcaattggcaagtggttatttcagccgctttggggtcaatggtagaaaaggaaatatcttcgtataaaaactagacagaatcattaccacaaactgcgttgtgatgtgttcgttcaactcacagagtttaacctttctcttcatagagcagttaggaaacactctgtttgtgaagtctgtaagtggatattctgacatcttgtggccttcgttggaaacgggatttcttcatattctgctacacagaagaattcccagtaacttccttgtgttgtgtgtattcaactcacagagttgaacgatcctttacacagagcagacttgaaacactctttttgtggaatttgcaagtggagatttcagccgctttgaggtcaatggtagaataggaaatatcttcctatagaaactagacagaatgattctcagaaactcctttgtgatgtgtgcgttcaactcacagagtttaacctttcttttcatagagcagttgggaaacactctgtttgtaaagtctgcaagtggatattcagacctccttgaggctttcgttggaaacgggatttcttcatattctgctagaaagaagaattcccagtaacttcccttgtgttgtgtgtgttcaactcacagagttgaactttcatttagtcagagcagatttgaaacactctttttgtggaatttgcaaatggagatttcaagcgctttgaggccaaaggcagaaaaggaaatatcttcgtataaaaactagacagaatcattctcagaaactgctctgcgatgtgtgcgttcaactctcagagtttaactttgcttttcattcagcagtttggaaacactctgtttgtaaagtctgcacgtggatattttgaccgcttagaggccttcgttggaaacgggtttctttcctgtaaggctagacagaagaattcccagtaacttccttgtgttgtgtacattcaactcacagagttgaacgttcccttagacagagcagatttgaaacactctttttgtgcaattagcaagtggagatttcaagcgctttaaggtcaatggcagaaaaggaaatatcttactttcaaaactagacagaatcattcccacaaactgcgttgtgatgtgttcgttcaactcacagagtttaacctttcttttcatagagcagttaggaaacactctgttggtaaattctgtaagtggatattctgacatcttgtggccttcgttgtaaacgggatttctacatattctgccagacagaagaattctcagaaacttccttgtgttgtgtgttttcaactcacagagttgaacgatcctttacacagagcagacttgaaacactccttttgtggaatttgcaagtggagattttagccgctttgaggtcaatggtagaataggaaatatcttcctatagaaagtagacagaatgattctcagaaactcctttagtgatgtgtgcattcaactcacagagtttaacctttcttttcatagagcagttaggaaacactctgtttgtaaagtctgcaagtggatattcagacctccttgaggccttcgttggaaacgggacttcttcatattatgctacacagaggaattcccagtaacttccttgtgttgtgtgtgttcaactcacagagttgaactttcatttacacagagcagatttgaaacactctttttgtggaatttgcaaatgaagatttcaagcgctttgaggccaaaggcagaaaaggaaatatcttcgtttcaaaactagacagaatcattctcagaaactgctctgcgatgtgtgcgttcaactctcagagtttaacttttcttttcattcagcagtttggaaacactctggttgtaaagtctgcacgtggataacttgaccacttagaggacttcgttggaaacgggtttttttcctgtaaggctagacagaagaattcccagtaacttccttgtgttgtgtgcattcaactcacagagttgaacgttcccttagacagagcagatttgaaacactctatttgtgcaatttgcaagtgtagttttcaagctctttaaggtcaacggcagaaaaggaaatatcttggtttcaaaactagacagaatgattctcagacacttctttgtgatgtgtgcgttcaactcacagagtttaacctttcttttcatagagcagttaggaaacagtctgtttgtcaattctgtaagtggatattctgacatcttgtggccttcgttggaaacgggatttcttcatattctgctagacagaagaattctcagtaactttcttgtgttgtgtgtattcaactcacagagttgaacgatcctttacacagagcagacttgaaacactctatttgtagaatttgcaagtggagatttcagccgctttgaggtcagtagtagaaaaggaaatatcttcgtggaaaaactagacagaatgattctcagaaactcttttgtgatgtgtgcgttcaactcacagagtttaacctttcttttcatagagcagttaggaaacactctgtttgtaaagtctgcaagtggatattcagacctctttgaggccttcgttggaaacgggatttcttcatattctgctagagagaagaattcccagtaacttccttgtgttgtgtgtgttcaactcacagagttgaactttcatttacacagagcagatttgaaacactctttttgtggaatttgcaagtggagatttcaagcgctttgaggccaaagttagaaaaggaaatatcttcgtataaaaactagacagaatcattctcagaaactgctttgcaatgtgtgcgttcaactctcagagtttaacttttcttttcattcagcagtttggaaacactctgtttgtaaagtctgcacgtggatattttgaccacttagaggccttctttggaaacgggtttttttcctgtaaggctagacagaagaattcccagtaacttccttgtgttgtgtacattcaactcacagagttgaacgttcccttagacagagcagatttgaaacactctttttgtgcaattggcaagtggggatttcaagcgcgttgaggtcaatggccgaaaaggaaatatcttcgtttcaaaactagacagaaaatgattctcagaaactcctttgtgatgtgtgcgttcaactcacagagtttaaccgttcttttcatagagtagttaggaaacactctgtttgtaaagtctgcaagtggatattcagacctctttgaggccttcgttggaaacgggatttcttcatattctgctagacagaagaactctcagtaacttccttgtgttgtgtgtattcaactcacagggttgaacgatcctttacacagagcatacttgaaacactcttcttgtggaatttgcaagtggagatttcagccgctttgaggtcaatggtagaataggaaatatcttcctatagaaactagacagaatgattctcagaaactcctttgtgatgtgtgcgttcaactcacagagtttaacctttctgttcatagagcagttaggaaacactgtgtttgtaaagtctgcaagtggatattcagacctccttgaggccttcgttggaaacgggatttcttcatattctgctagacagaagaattcccggtaacttccttgtgttgtgtgtgttcaactcacagagttgaactttcatttacacagagcagatttgcaacactcttttgtggaatttgcaagtggagatttcaagcgctttgaggccaaaggcagaaaaggaaatatcttcgtttcaaaactagacagaatcattctcagaaactgctctgcgatgtgtgcgttcaactctcagagtttaacttttcttttcatttagcagtttggaaacactctgtttgtaaagtctgcacgtggataatttgaccacttagaggccttcgttggaaacgggtttttttcatgtaaggctagacagaagaattcccagtaacttccttgtgttgtgtgcattcaactcacagagttgaacgtacccttagacagagcagatttgaaacactctatttgtgcaatttgcaagtgtagttttcaagctcttttaggtcaacggcagaaaaggaaatatcttggtttcaaaactagacagaatcattcccacaaactgcgttgtgatgtgttcgttcaactcacagagtttaacctttctgttcatagagcagttaggaaacactctgtttgtaaagtctgtaagtggatattctgacatcttgtggccttcgttgggaacgggatttcttcatattctgctagacagaagaattctcagaatcttccttgtgttgtgtgtattcaactcacagagttgaacgatcctttacacagagcagacttgatacagtctttttgtggaatttgcaagtggagatttcagccgctttgaggtccatggtagaaaaggaaatatcttcgtataaaaactagacagaatgattctcagaaactcctttgtgatgtgtgcgttcaactcacagagtttaacctttcttttcatagagcagttaggaaacactctgtttgtaaagtctgcaagtggatattcagacatccttgaggctttcgttgggaacgggttttcttcatattctgctagaaagaagaattctcagtaacttccttgtgttgtgtgtattcaactcacagagttgaactttcatttacacagagcagatttgaaacactctttttgtggaatttgcaaatggagatttcaagggctttgaggccaaaggcagaaaaggaaatatcttcgtttcaaaactagacagaatcattctcagaaactgctctgtgatgtgtgcgttcaactctcagagcttaacttttctgttcattcagcagtttggaaacactctgtttgtaaagtctgcacgtggataatttgaccacttagaggccttcgttggaaacgggtttttttcatgtaaggctagacagaagaattcccagtaacttccttgtgttgtgtgcattcaactcacagagttgaacgttcccttagacagagcagatttgaaacactctatttgtgcaatttgcaagtgtagatttcaagcgctttaaagtcaatggcagaaaaggaaatatcttcgtttcaaaactagacagaatgattctcataaactcctttgtgatgtgtgcgttcaaatcacagagtttaacttttcttttcatagagcagttaggaaacactctgtttgtaaagtctgcaagtggatattcagacctctttgaggccttctttggaaacgggatttcttcatattatgctagacagaataattctcagtaacttccttgtgttgtgtgtattcaactcacagagttgaacgatcctttacacagagcagacttgaaacactctttttgtgcaatttgcaagtggagatttcagccgatttgaggtcaatggtagaataggaaatatcttcctatagaaactagacagaatgattctcagaaactcctttgtgatgtgtgcgttcaactcacagaatttaacatttcttttcatagagcagttaggaaacactctgtttgtaaagtctgcaagtggatattcagacctctttgaggccttcgttggaaacgggatttcttcatattctgctagacagaagaattcccagtaacttccttgtgttgtgtgtgttcaactcacagagttgaactttgatgtacacagagcagatttgaaacactctttttgtggaatttgcaagtggagatttcaagcgctttgaggccaaaggcagaaaaggaaatatcttcgtataaaaactagacagaatcattctcagaaactgctctgcgatgtgtgcgttcaactctcagagtttaacttttcttttcattcagcagtttggaaacactctgtttgtatagtctgcacgtggatattttgaccacttagaggccttcgttggaaacgggtttttttcctgtaaggctagacagaagaattcccagaaacttccttgtgttgtgtgcattcaactcacagagttgaacgttcccttagacagagcagatttgaaacactctatttgtgcaatttgcaagtgtagatttcaagcgctttaaggtcaatggcagaaaaggaaatatcttcgtttcaaaactagacagaatcattcccacaaactgcgttgtgaagtgttcgttcaactcacagagtttaacctttctgttcatagagcagttaggaaacactctgtttgtaaagtctgtaagtggatattctgacatcttgtggccttcgttggaaacgggatttctgcatattctgctagacagaagaattctcagaaacttccttgtgttgtgtgttttcaactcacagagttgaacgatcctttacgcagagcagacttgaaacactctttttgtggaatttgcaagtggagatttcagccgctttgaggtcaatggtataaaaggaaatatcttcgtataaaaactagacagaatgattcacagaaactcctttgtgatgtgtgcgttcaactcacagagtttaaccattcttttcatagagcagttaggaaacactctgtttgtaaagtctgcaagtggatattcagacctctttgaggccttcgttggaaacgggatttcttcatattctgctagacagaagaattcccagtaacttccttgtgttgtgtgtgttcaactcacagagttgaactctcatttacacagagcagatttgaaacactctttttgtggaatttgcaagtggagatttcaagcgctttgaagccaaaggcagaaaaggaaatatcttcgtataaaaactagacagaatcattctcagaaactgctctgcgatgtgtgcattcaactctcagagtttaacttatcttttcattcagcagtttggaaacactctgtttgtaaagtctgcacgtggataatttgaccacttagaggtcttcgttggaaacgggtttttatcatgtaaggctagacagaagaattcccagtaactaccttgtgttgtgtgcattcaactcacagagttgaacgttcccttagacagagcagatttgaaacactctatttgtgcaatttgcaagtgtagttttcaagctctttaaggtcaacggcagaaaaggaaatatcttggtttcaaaactagacagaatcattcccacaaactgcgttgtgatgtgttcgttcaactcacagagtttaacctttcttttcattgagcagttaggaaacagtctgtttgtaaattctgtaagtggatattctgacatcttgtggccttcgttggaaacgggatttcttcatattctgctagacagaagaattctcagtaacttccttgtgttgtgtgtattcaactcacagagttgaacgatcctttacacagagcagacttgaaacactctttttgtggaatttgcaagtggagatttcagccgctttgaagtcaaaggtagaaaaggaaatatcttcgtataaaaactagacagaatgattctcagtaagttctttgtgatgtgtgcgttaaactcacagggattaacctttcttttcatagagcagttaggaaacactctgtttgtaaagtctgcaagtggatattcagacctccttgaggccctcgttggaaacgggatttattcaaattatgctagacagaagaattctcagtaacttccttgtgttgtgtgtattcaactcacagagttgaacgatcctttacacagagcagattagaaacactctttttctcgaatttgcaggtagagatttcagccgctttgcggtcaatagtagaaaagggaatatcttcgtataaaaactagacagaatgattctcagaaactcctttgtgatgtgtgcgttcaactcacagagttcaacctttcttttcatagagcagttaggaaacactctgtttgtaaagtctgcaagtggatattcagacctctttgaggccttcgttggaaacgggttttcttcatattatgctagacagaagaattctcagtagcttccttgtgttgtgtgtattcaactcacagagttgaacgatcctttacacagagcagacttgaaacactctttttgtggaatttgcaattggagatttcagccgctttgaggtcaatggtagaataggaaatatcttcgtataaaaactagacagaatgattctgagaaactcctttgtgatgtgtgcgttcaactcacagagtttaacctttcttttcatagagcagttaggaaacactctgtttgttaagtctgcaagtggatattcagacctctttgaggccttcgttggaaacgggatttcttcatattctgctagactgaagaattctcagtaacttccttgtgttgtgtgtattcaactcacagagttgaacgatcctttacacagagcagacttgaaacactctttttctggaatttgcaagtggagatttcagccgctttgaggtcaatggtagaataggaaatatcttcctatagaaactagacagaatgattctcagaaactcctttgagatgtgtgtgttcaactcacagagtttaacctttcttttcatagagcaattaggaatcactctgtttgtaaagtctgcaagtggatattcagacctctttgaggccttcgttggaaacgggtttttttcatataaggctagagagaagaattctcagtaacttccttgtgttgtgtgtattcaactgacatagttgaactttcatttagagagagcagatttgaaacactgtttttgtggaatttgcaagtggagatttcaagcgctttggggccaaaggcagaaaacgaaatatcttcgtataaaaactagacagaatcattctaagaaactgctctgcgatgtgtgcgttcaactctcagagtttaacttttcttttcattcagcagtttggaaacactctgtttgtaaagtctgcacgtggatattttgaccacttagaggccttcgttggaaacgggtttttttcctgtaaggctagacagaagaattcccagtaacttccttgtgttgtgtacattcaactcacagagttgaacgttcccttagacagagcagatttgaaacactctttttgtgcacttggcaagtggagatttcaagcgctttaaggtcaatggcagaaaaggaaatatcttcgtttcaaaactagacagaatgattctcagaaactcctttgtgatgtgtgtgttcaactcacagagtttaacctttcttttcatagagcagttaggaaacaatctgtttgtaaagtctgcaagtggatattcagacctctttgaggccttcgttggaaacgggtttttttcatataaggctagacagaagaattcccagtaacttccttgtgttgtgtgtgttcgactcacagagttgaactttcatttacacagagcagatttgaaacactctttttgtggaatttgcaagtggagatttcagccgctttgaagtcaaaggtagaaaaggaaatatcttcctataaaaactagacagaatgattctcataaactcctttgtgatgtgtgcgttcaagtcacaaagtttaacttttcttttcatagagcagttaggaaacactctgtttttaaagtctgcaagtggataatcagacctctttgaggccttcgttggaaacgggatttcttcatattatgctagacagaagaattctcagtaacttccttgtgttgtgtgtattcaactcacagagttgaacgatcgtttacacagagcagacttgaaacattctttttgtggaatttgcaagtggagatttcagccgctttgaggtcaatggtagaataggaaatatcttcttatagaaactagacagaatcattctcagaaactgctctgcgatgtgtgcgttcaactctcagagtttaacttttcttttcatttagcagtttggaaacactctgtttgtaaagtctgcacgtggatattttgaccacttagaggcctacgttggaaacgggtttttttcctgtaaggctagacagaagaattcccagtaacttccttgtgttgtgtgcattcaactcacagagttgaacgttcccttagacagagcagatttgaaacactctatttgtgcaatttgcaagtgtagatttcaagcgctttaaggtcaacggcagaaaaggaaatatcttcgtttcaaaactaggcagaatgattctcataaactcctttatgatgtgtgcattcaactcacagagtttcacctttcttttcatagagcagttaggaaacactctgtttgtaaagtctgcaagtagatattcagacctccttgaggccttcgttggaaacgggatttcttcatattctgctagacagaagaattctcagtaacttccttgtgttgtgtgtattcaactcatagagttgaacgatcctttacacagagcagacttgtaacactctttttgtggaatttgcaagtggagatttcagccgctttgaagtcaaaggtagaaaaggaaatatcttcctataaaaactagacagaatgattctcagaatctcctttgtgatgtgtgcgttcaactcacagagtttaacctttcttttcatagagcagttaggaaacactctgtttgtaaagtctgcaagtggatattcagacctctttgaggtcttcgttggaaacgggtttttttcatataaggctagacagaggaattcccagtaacttccttgtgttgtgtgtgttcaactcacagagttgaactttcatttacacagagcagatttgaaacactctttttgtggaatttgcaagtggagatttcaagcgctttgaggccaaaggcagaaaaggaaatatcttcgtataaaaactagacagaatcattctcagaaactgctctgcgatgtgtgcgttgaactctcagagtttaacttttcttttcattcagcagtttgaaaacactctgtttgtaaagtctgcacgtggataacttgaccacgtagaggccttcgttggaaacgggtttttttcatgtaaggctagacagaagaattcccagtaacttccttgtgttgtgtgcattcaattcacagaattgaacgttcccttagacagagcagatttgaaacactctatttgtgcaatttgcaagtgtagatttcaagcgctttaaggtcaatggcagaaaaggaaatatcttcgtttcaaaactagacagaatcattcccacaaactgcgttgtgatgtgttcgttcaactcacagagtttaacctttctgttcatagagcagttaggaaacactctgtttgttaagtctgtaagtggatattcttacatcttgtggccttcgttggaaacgggatttcttcatattctgctagacagaagaattctcagtaacttccttgtgttgtgtgtattcaactcacagagttgaaagatcctttacagagagcagacttgaaacactctttttgtggaatttgtaagtggagatttcagccgctttgaggtcaatggtagaataggaaatatcttaatatagaaactagacagaatgattctcagaaactactttgcgatgtgtgcgttcaactcacagagtttaacctttcttttcatagagcagttaggaaacactctgtttgtaaagtctgcaagtggatattcagacctccttgaggccttcgttggaaacgggatttcttcatattatgctagacagaagatttcccagtaacttccatgtgttgtgtgtgttcaactcacagagttgaactttcatttacacagagcagatttgacacactctttttgtggaatttgcaaatggagatttcaagcgctttgaggccaaaggcagaaaaggaaatatcttcgtataaaaactagacagaatcattctcagaaactgctctgcgatgtgtgcgttcaactctcagagtttaacttttcttttcattcagcagtttggaaacactctgtttgtaaagtctgcacgtggatattttgaccacttagaggccttcgttggaaacgggcttttttcctgtaaggctagacagaagaattcccaggaacttccttgtgttgtgtacattcaactcacagagttgaacgttcccttagacagagcagatttgaaacactctttttgtgcaattggcaagtggtgatttcagcagctttgaggtcaatggtagaaaaggaaatatcttcgtataaaaactagacagaatgattctcagaaactcctttgtgatgtgggtgttcaactcacagagtttaactttcttttcatagagctgttaggaaacactctgtaaagtctgcaagtgggtattttaacctctttgaggccttcgttggaaacgggtttttttcatgtaaggctagagagaagaattctcagtaacttccttttgttgtgtgtattaaactgacagagttgaactttcatttacacagagcagatttgaaacactctttttgtggtatttgcaagtggagatttcagccgctttgatgtcaatgatagaaaaggaaatatcttcatataaaaattagacagaatgattctcagaaactcctttgtgatatgggtgttcaactcacagagtttaacctttcctttcatagagcagttaggaaacactctgtttgtaaagtctgcaagtggatattttcacctctttgaggccttcgttggaaacgggttttttttcatgtaattctagacagaagaattctcagtaactttcttgtgttgtgtgtattcaactgacagagttgaactatcatttagagagtgcagatttgaaacactgtttttgtggaatttgtaagtggagatttcaagcgctttggggccaaaggcagaaaaggaaatatcttcgtataaaaactagacagaatcattctcagaaactgctgcgtgatgtgtgcgttcaactctcagagtttaacttttcctttcattcagcggtttggaaacactctgtttgtaaagtctgcacgtggaaattttgaccacttagtggccttcgttggaaacgggtttttttcatgtaaggctagacagaataattcccagtaacttccttgtgttgtgtacattcaactcacagagttgaacgttcccttagacagagcagatttgaaacactctttttgtgcaattggaaagtggagatttcaagcgcttaaggtcaatggcagaaaaggaaatatcttcgtttcaaaactagacagaatcattcccacaaactgcgttgtgatgtgttagttcaactcacagagtttaacctttcttttcatagagcagttaggaaacactctgtttgtaaattctgtaagtggatattctgacatcttgtggccttcgttggaaacgggatttcttcatattctgctagacagaagaattctcagtaacttccttgtgttgtgtgtattcaactcacagagttgaacgatcctttacacagagcagacttgaaacactctttttgtggaatttgcaagtggagatttcagccgctttgagttcaatgttagaataggaaatatcttcctatagaaactagacagaatgattctcagaaactcctttgtgatgtgtgcgttcaactcacagagtttaatctttcttttcatagagcagttaggaaacactctctaaagtctgcaagtggatattcagacctccttgaggtcttcgatggaaacgggatttcttcatattctgctagacagaagaattcccagtaacttccttgtgttgtgtgtgttcaactcacagagttgaactttcatttacacagagcagatttgaaacactctttttgtggaatttgcaagtggagatttcaagcgctttgaggccaaggcagaaaaggatatatcttcgtataaaaactagacagaatcattctcagaaactgctctgcgatgtgtgcgttcaactctcagagtttaacttttcttttcattcagctgtttggaaacactctgtttgtaaagtctgcacgtggatattttgaccacttagaggccttcgttggaaacgggtttttttacctgtaaggctagacagaagaattcccagtaacttccttgtgttgtgtgcattcaactcacagagttgaacgttcccttagacagagcagatttgaaacactctatttgtgcaatttgcaagtgtagttttcaagctctttaaggtcaacggcagaaaaggaaatatcttggtttcaaaactagacagaatgattctcagaaacgcctttgtgatgtgtgtgttcaactcacagagtttaacctttcttttcatagagcagttaggaaacactctgttggtaatgtctgcaagtggatattcagacctctttgaggccttcgttggaaacgggatttcttcatactgtgctagacagaagaattctcagaatcttccttgtgttgtgtgtattcaactcacagagttgaacgatcctttacacagagcggaattgaaacactctttttgtgaaatttgcaagtggagatttcagccgcgttgaggtcaatggtagaaaaggaaatctcttcgtataaaaactagacagaatgattctcagaaactcctttgtgatgtgtgcgttcaactcacagagtttaacctttcttttcatagagcagttaggaaacactctgtttgtaaagtctgcaagtggatattcacacctccttgaggccttcgttggaaacgggatttcttcatattatgctagacagaagaattctcagtaacttccttgtgttgtgtgtattcaactcacagatttcaacgatcctttacacagagcagacttgaaacactctttttgtggaatttgcaagtggagatttcagccgctttgaggtcaatggtagaataggaaatatcttcctatagaaactagacagaatcattctcagaaactgctctgcgatgtgtgcgttcaactctcagagtttaacttttcttttcattcagcagtttggaaacactctgtttgtaaagtctgcacgtggatattttgaccacttagaggccttcgttggaaacgggtttttttcctgtaaggctagacagtagaattcccagtaacttccttgtgttgtgtacattcaactcacagagttgaacgttcccttagacagagcagatttgaaacactctttttgtgcaattggcaaatggagatttcaagggctttaaggtcaatggcagaaaaggaaatatcttcgtttcaaaactagacagaatcattcccacaaactgcgttgtgatgtgttcgttcaactcacagggtttaacctttcttttcatagagcagttaggaaacagtctgtttgtcaattctgtaagtggatattctgacatcttgtggccttcgttggaaacgggatttcttcatattctgctagacagaagaattctcagtaacttccttgtgttgtgtgtattcaactcacagagttgaacgatcctttacacagagcagacttgtaacactctttttgtggaatttgcaagtggagatttcagccgctttgaagtcaaaggcagaaaaggaaatatcttcgtataaaaactagacagaatgattctcagaaactcctttgtgatgtgtgcgttcaacccacagagtttaacctttcttttcatagagcaattaggaaacactctgtttgtaaagtctgcacgtggatatttggacttctttgaggccttcgttggaaacgggtttttttcatgtaaggctagacagaagaattcccagtaacttccttgtgttgtgtgtgttcaactcacagagttgaactttcatttacacagagcagatttgaaatactctttttgtggaatttgcaggtggagatttcaagcgctttgaggccaaaggcagaaaaggaaatatcttcgtataaaaactagacagaatcattctcagaaactgctctgtgatgtgtgcgttcaactctcagagtttaacttttcttttcattcagcagtttggaaacactctgtaaagtctgcacgtagatattttgaccacttagaggccttcgttggaaacgggtttttttcatgtaaggctagacagaataattcccagtaacttccttgtgttgtgtacattcaactcacagagttgaacgttcccttagacagagcagatttgaaacactctttttgtgcaattggcaagtggagatttgaagcgctttaaggtcaatggcagaaaaggaaatatcttcgtttcaaaactagacagaatgattctcagaaaatcttttgtgatgtgtgcgttcaactcacagagtttaacttttcttctcatagagcagttaggaaacactctgtttgtaaagtgtgcaagtggatattcagacctccttgaggccttcgttggaaacgggatttcttcatattctgctagacagaagaattctcagtaacttccttgtgttgtgtttattcaactcacagggttgaatgatcctttacacagagcagacttgaaacactctttttgtggaatttgcaagtggagatttcagccgctttgaggtcaatggtagaaaagtaaatatcttcgtataaagactagacagaatgattctcagaaactcctttgtgatgtgtgcgttcaactcacagagtttaacctttcttttcatagagcagttaggaaacactctgtttgtaaagtctgcaagtggatattcagacctctttgaggccatcgttggaaacgggatttcttcatattctgctagagagaagaattctcagtaacttccttgtgttgtgtgtattcaactgagagagttgatctttcatttagagagatcagatttgaaacactgtttttgtggaatttgcaagtggagatttcaagcgctttggggccaaaggcagaaaaggaaatatcttcgtataaaaacttgacagaatcattctcagaaactgctgcgtgatctgtgcgttcaactctcagagtttaacttttcttttcattcagcggtttggaaacactctgtttgtaaagtctgcacgtggatattttgaccacttagaggccttcgttggaaacgggtttttttcatgtaaggctagacagaagaattcccagtaacttccttgtgttgtgtgcattcaactcacagagttgaacgttcccttagacagagcagatttgaaacactctatttgtgcaatttgcaagtgtagatttcaagcgctttaaggtcaacggcagaaaaaggaaatatcttcgtttcaaaactagacagaatcattcccacaaactgcgttgtgatgtgttcgttcaactcacagagtttaacctttctgttcatagagcagttaggaaacactctgtttgtaaagtctgtaagtggatattctgacatcttgtggccttcgttggaaaagggatttcttcatattttgctagacagaagaattcccagtaacttccttgtgttgtgtacattccactcacagagttgaacgttcccttagacagagcagacttgtaacactctttttgtggaatttgcaagtggagatttcagccgctttcaagtcaaaggtagaaaaggaaatatcttcctataaaaactagacagaatgattctcagaaactcctttgtgatgtgtgcgttcaactcacagagtttaacctttcttttcatagagcagttgggaaacactctgtttgtaaagtctgcaagtggatattcagacatctttgaggctttcgttggaaacgggatttcttcatattctgctagaaagaagaattcccagtaacttccttgtgttgtgtgtgttcaagtcacagagttgaactttcatttacacagagcagatttgaaacactctttttgtggaatttgcaagtggagatttcaagcgctttgaggccaaaggcagaaaaggaaatatcttcgtttcaaaactagacagaatcattctcagaaactgctctgtgatgtgtgcgttcaactcacagagtttaacttttcttttcattcagcagtttggaaacactctgcttgtaaagtctgcaagtggatatattgacctctttgagtccttcattggatacgggctttttccatgtaaggctagacagaagaattcccagtaacttctttgtgttgggtgcattcaactcacagagttgaacgttcctttagacagagcagatttgaaacactctttttgtgcaatttgcaagtggagatttcaagagctttaaggtcaatggcagaaaaggaaatatcttcgtttcaaaactagacagaatgattctcagaaactcctttgtgatgtgtgcgttcaactcacagagtttaacctttcttttcatagagcagttaggaaacactctgtttgtaaagtctgcatgtggatattcagacctctttgaggccatcgttggaaacgggatttcttcatattctgctagagagaagaattctcagtaacttccttgtgttgtgtgtattcaactcacagagttcaacgatgctttacacagaggagacttgaaacacactttttgttgaatttgcaagtggagatttcagccgatttgaggtcaatggtagaataggaaatatcttcgtataaaaactagacagaatgattctgagaaactcctttgtgatgtgtgcgttcaactcacagagtttaacctttcttttcatagagcagttaggaaacactctgtttgtaaagtgtgcaagtggatattcagacctccttgaggccttcgttggaaaggggatttcttcatattatgctagacagaagaattcccagtaccttccttgtgttgtgtgtgttcaactcacagagttgaactttcatttacacagagcagatttgaaacactctttttgtggaatttgcaagtggagatttcaagcgctttgaggccaaaggcagagaaggaaatatcttcgtttcaaaactagacagaatcattctcagaaactgctctgcgatgtgtgccgttcaactctcagagtttaactttgcttttcattcagcagtttggaaacactctgtttgtaaagtctgcacgtggataatttgaccacttagaggccttcgttggaaacgggtttttttcatgtaaggctagacagaagaattcccagtaacttccttctgttgtgtgcattccactcacagagttgaacgttcccttagacagagcagatttgaaacactctatttgtgcaatttgcaagtgtagatttcaagcgctttaaggtcaatggcagaaaaggaaatatcttcgtttcaaaactagacagaataattcccacaacctgcgttgtgatgtgttcgttcaactcacagagtttaacctttcttttcatagagcagttaggaaacagtctgtttgtcaattctgtaagtggatattctgacatcttgtggccttcgttggaaacgggatttcttcatattctgctagacagaataattctcagaaacttccttgtgttgtgtgtattcaactcacagagttgaacgatcctttacagagagcagacttgaaacactctttttgtggaatttgcaagtggagatttcagccgctttgaggtcagtggtagaataggaaatatcttcctatagaaactagacagaatgattctcagaaactcctttgtgatgtgtgcgttcaactcacagagtttaacctttcttttcatagagcagttaggaaacactctgtttctaaagtctgcaagtggatattcagacctgtttgaggccttcgttggaaacgggtttttttcatataaggctagacagaagaattctcagtaacttctttgtgttgtgtgtattcaactgacagagttgaactttcatttatagagagcagatttgaaacactgtttttgtggaatttgcaagtggagatttcaagcgctttggggccaaaggcggaaaaggaaatatcttcgtataaaaactagacagaatcattctcagaaactgctgcgtgatgtgtgcgttgaactctcagagtttaacttttcttttcattcagcggtttggaaacactctgtttgtaaagtctgcacgaggatattttgaccccttagaggccttcgttggaaacgggtttttttcatgtaaggctagacagaagaattcccagtaacttccttgttttgtgtgcattcaactcacagagttgaacgttcccttagacagagcagatttgaaacactctatttgtgcaatttgcaagtgtagatttcaagcgctttaaggtcaacggcagaaaaggaaatatcttcgtttcaaaactagacagaatcattcccacaaactgcgttctgatgtgttcgttcaactcacagagtttaacctttctgttcatagagcagttaggaaacactctgtttgtaaagtctgtaagtggatattctgacatcttgtggccttcgttggaaacgggatttcttcatattctgctagacagaagaattctcagtaactttccttgtgttgtgtgtattcaactcacagagttgaacgatcctttacacagagcagacttgtaacactctttttgtggaatttgcaattggagatttcagccgcgttgaggtcaatggtagaaaaggaaatatcttcgtataaaaactagacagaatgattctcagaaactcctttgtgatgtgtgcgctcaactcacagagttcaacctttcttttcatagagcagttaggaaacactctgtttgtaaagtctgcaagtggatattcagacctctttgaggccttcgtaggaaacgggatttcttcatattatgctagacagaagaattcccagtaacttccttgtattgtgtgtgttcgactcacagagttgaactttcatttacacagagcagatttgaaacactctttttgtggaatttgcaagtggagatttcaagcgctttgaggccaaaggcagaaaaagaaatatcttcgtttcaaaactagacagaatctttctcagaaactgctctgggatgtgtgcgttcaactcacagagtttaacttttctttccattcagcagtttggaaacactctgtttggaaagtctgcacgtggatattttgacctctttgaggccttcgttggaaacgggtttttttcatgtaaggctagacagaagaattctcagtaacttccttgtgttgtgtgtattcggctcacagagttgaacaatcctttacacagagcagacttgaaacactctttttgtggaatttgcaagtggagattacagccgctttgaggtcaatggtagaaaaggaaatatcttcgtataaagactagacagaatgattctcataaactcctttgtgatgtgtgcgttcaactcacagagtttaacttttcttttcatagagcagttaggaaacactctgtttgtaaagtctgtaagtggatattctgacatcttgtggccttcgttggaaacgggatttcttcatattctgctagacagaagaattctcagaaacttccttgtgttgtgtgtattcaactcacagagttgaacgatcctttacatagagcagacttgaaacactctttttgtggaatttgcaagtggagatttcagccgctttgaggtcaacggtagaataggaaatatcttcctatagaaactagacagaatgattctcagaaactcctttgtgatgtgtgcgttcaactcacagagtttaacctttcttttcatagagcagttaggaaacactctgtgtgtaaagtctgcaagtggataattcagacatccttgaggccttcgttggaaactggatttcttcatattatgctagacagaagaattctcagtaacttccttgtgttgtgtgtattcaactgacagagttgaactttcatttagagagatcacatttgaaacactgtttttgtggaatttgcaagtggagatttcaagcgctttggggccaaaggcagaaaaggaaatatcttcgtataaaaactagacagaatcattctcagaaactgctgcgtgatgtgtgcattcaactctcagagtttaacttttcttttcattcagcggtttggaaacactctgtttgtaaagtccgcacgtggatattttcaccacttagaggccttcttttgaaacggttttttgcatgtaaggctagacagaagaattcccagtaacttccttgtgttgtgtacattcaactcacagagttgaacgttcctttagacagagcagatttgaaacactctttttgtgcaattggcaagtggagatttcaagcgctttaaggtcaatggcagaaaaggaaatattttcgtttcaaaactagacagaatgattctcagaaacttcatttgtgaagtgtgcgttcaactcacagagtttaacctttcttttcatagagcagttaggaaacactctgtttgtaaactctgcaagtggatattcagacctctttgaggccttcgttggaaacgggatttcttcatactgtgctagacagaagaattctcagtaacttccttgtgttgtgtgtattcaactcacagagttgaacgatcctttacacagagcagacttgtaacactctttttgtggaatttgcaagtggagatttcagccgctttgaagtcaaaggtagaaaaggaaatatcttcctataaaaattagacagaatgattctcagaaactcctttgtgatgtgtgcgttcaactcacagagtttaacttttcttttcatagagcagttaggaaacactctttttgtaaagtctgcaagtggatattcagacctctttgaggccttcgttggaaacgggtttttttcatataaggctagacagaagaattcccagtaacttccttgtgttgtgtgtgttcaactcacagagttgaactttgatttacacagagcagatttgaaacactctttttgtggaatttgcaaatggagatttcaagcgctttgaggccaaaggaagaaaaggaaatatcttcgtataaaaactggacagaatgattctcagaaactgctctgtgatgtgtgcgttcaactctcagagtttaactttccttttcattcagcagtttggaaacactctgtttgaaaagtctgcacgtggataatttgaccacatagaggccttcgttggaaacgggtttttgtcatgtagggctagacagaagaattcccagtaacttccttgtgttgtgtacattcaactcacagagttgaacgttcccttagacagagcagatttggaacactctttttgtgcaattggcaagtggagatttcaagcgctttgaggtcaatggcagaaaaggaaatatcttcgtttcaaaactagacagaatcattcccacaaactgcgttgtgatgtgttcgttcatctcacagagtttaacctttcttttcatagagcagttaggaaacactctgtttgttaattctgtaagtggatattctgacatcttgtggccttcgttggaaacgggatttcttcatattctgctagacagaagaattctcagtaacttccttgtgttgtgtgtattcaactcacagagttgaatgatcctttacacagaacagtcttgaaacactctttttgtggaatttgcaagtggagatttcagccgctttgaggtcaatggtagaataggaaatatctacctatagaaattagacagaatgattctcagaaacttctttgtgatgtgtgcgttcaactcacagagtttaacctttcttttcatagagcagttaggaaacactgtgtttttaaactgtgcaagtggatattcagacctctttgaggccttcgttggaaacgggatttcttcatactgtgctggagagaagaattctcagtaacttccttgtgttgtgtgtattcaactgacagagttgaactttcatttagagagagcacatttgaaacactgtttttgtggaatttgcaagtggagatttcaagagctttggggccaaaggcagaaaaggaaatatcttcgtataaaaactagacagaaatcattctcagaaaactgctgcgtgatgtgtgcgttcaactctcagagtttaacttttcctttcattcagcggtttggaaacactctgtttgtaaagtctgcacgtggatattttgaacacttagaggccttcgttggaaacgggtttttttcatgtaaggctagacagaagaattcccagtaacttccttgtgttgtgtacattcaactcacagagttgaacgttcccttagacagagcagatttgaaacactctttttgtgcatttggcaagtggtgatttcagccgctttgaggtcaatggtagaaaaggaaatatcttcgtataaaaactagacagaatcattcccacaaactgcgttgtgatgtgttcgttcaactcacagagtttaacctttcttttcatagagcagttaggaaacagtctgtttgtcaattctgtaagtggatattctgacatcttgtggccttcgttggaaacgggatttcttcatattcctgctagacagaagaattctcagtaacttccttgtgttgtgtgtattcaactcacagagttgaacgatcctttacacagagcagacttgaaacactctttttgtggaatttgcaaatggagatttcagccgctttgatgtcaatggtagaaaaggtaatatcttcgtataaagactagacagaatgattctcagaaactcctttgtgatgtgtgtgttcaactcacagagttcaacctttcttttcatagagcagttgggaaacactctgtttgtaaagtctgcaagtggatattcagacttctttgaggccttctttggaagcgggatttcttcatgttctgctagacagaagtaattctcagtaacttccttgtgttgtgtgtattcaactcacagagttgaacgatcctttacacagagcagacttgtaacactctttttgtggaatttgcaagtggagatttcaagcgctttgaggccaaaggcagaaaaggaaatatcttcgtttcaaaactagacagaatcattctcagaaactgctctgcgatgtgtgcgttcaactctcagagtttaacttttcttttcattcagcagtttggaaacactctgtttgtaaagtctgcacgtggatattttgaccacttagaggccttcgttggaaacgggtttttttcctgtaaggctagacagtagaattctcagtaacttccttgtgttgtgtgtattcaactcacagagttgaacgatcctttacagagagcagacttgaaacactctttttgtggaatttgcaagtggagatttcagccgctttgaggtcaatggtagaataggaaatatctttctatagaaactagacagaatgattctcagaaactcctttgtgatgtgtgcgttcaactcacagagtttaacctttcttttcatagagcagttaggaaacactctgtttgtaaagtctgcaagtggatattcagacctctttgaggccttcgttggaaacgggatttcttcatattctgttacacagaagaattctcagtaacttccttgtgttgtgtgtattcaactcacagagttgaacgatcctttacacagagcagacttgaaacactctttttgtagaatttgcaagtggagatttcagccgctttgaggtcaatagtggaaaaggaaatatcttcgtagaaaaactagacagaatgattctcagaaactcctttgtgatgtgtgcgttcaactcacagagtttaacctttcttttcatagagcagttaggaaacactctgtttgtaaagtctgcaagtggatattcagacatcattgaggctttcgttggaaacgggatttcttcatattctgctagaaagaagaattcccagtaacttccttgtgttgtgtgtgttcaactcacagtaggtgaacggtcctttacacaggagcagatttgagacactctttttgtggaatttgctaatggagatttcaagcgctttgaggccaaaggcagaaaaggaaatatcttcgtataaaaactagacagaatcattctcagaaactgctctgcgatgtctgcgtacaactctcagagtttaacttttcttttcattcagcagtttggaaacactctgtttgtaaagtctgcacgtggataatttgaccacttagaggccttcgttggaaacgggtttttttcatgtaaggctagacagaagaattcccagtaacttccttgtgttgtgtacattcaactcacagagttgaacgttcccttagacagagcatatttgaaacactctttttgtgcaattggcaagtggagatttcaagtgctttaaggtcaatggcagaaaaggaaatatcttcgtttcaaaactagacagaatcattcccacaaactgcgttgtgatgtgttcgttcaactcacagagtttaacctttcttttcatagagcagttaggaaacagtctgtttgtaaattctgtaagtggatattctgacatttgtggccttcgttggaaacgggatttcttcatattttgctagacagaagaattctcagaaactttgttgtgttgtgtgttttcaactcacagagttcaacgatcctttacacagagtagacttgaaacactctttttgtggaattggcagggtggagatttcagccgctttgaggtcaatggtagaaaaggaaatatcttcgtataaaaactagacagagtgattctcagaaactcctttgtgatgtctgcgttcaactcacagagtttaacctttcttttcatagagcagtttggaaacactctgtttgtaaagtctgcaagtggatattcagacctccttgaggccttcgttggaaacgggatttcttcatattctgctatacagaagaattctcactaacttccttgtgttgtgtgtattcaactgacagagttgaacattcatttagagagagcagatttgaaacactgtttttgtggaatttgcaagtggagatttcaagcgctttggggccaaaggcagaaaaggaaatatcttcgtataaaaactagacagaatcattctcagaaactgctgcgtgatgtgtgcgttcaactctcagagtttaacttttcttttcattcagcggtttggaaacactctgtttgtaaagtctgcacgtggatattttgaccacttagaggccttcgttggaaacgggttttcttcatgtaaggctagacagaagaattcccagtaacttccttgtgttgtgtgcattcaactcacagagttgaacgttcccttagacagagcagatttgaaacactctatttgtccaatttgcaagtgtagatttcaagcgctttaaggtcaacggcagaaaaggaaatatcttcgtttcaaaactagacagaatgattctcataaactcctttgtcatgtgtgcgttcaactcacagagtttaacttttcttttcatagagcagttaggaaacactctgtttgtaaagtctgcaagtggatattcagacctctttgaggcctttgttggaaacgggatttcttcatattatgctagacagaagaattctcagtaacttccttgtgttgtgtgtattcaactcacagagttgaacgatcctttacacagagcagacttgaaacattctttttgtggaatttgtaagtggagatttcagccgctttgaggtcaatggtagaataggaaatatcttcctatagaaattagacagaatgattctcagaaactcctttgtgatgtgtgctttcaacgcacagagtttaacctttcttttcatagagcagttaggaaacactctgtttgtaaagtctgcaagtggatattcagacctccttgaggccttcgttggaaacgggagtttcttcctattatgctagacagaagaattctcagtaacttccttgtgttgtgtgtattcaactcacagagttgaactatcctttacacagagcagacttgaaacactctttttgtggaatttgcaagtggagatttcagccgctttgagttcaatggtagaataggaaatatcttcctatagaaactagacagataatcattctcagaaactgctgcgtgatgtgtgcgttcaactctcagagtttaacttttcttttcattcagcggtttggaaacactctgtttgtaaagtctgcacgtggatattttgaccacttagaggccttcgttggaaacgggtttttttcatgtaaggctagacagaagaattcccagtaacttccttgtgttgtgtgcattcaactcacagagttcaacgttcccttagacagagcagatttgaaacactctatttgtgcaatttgcaagtgtagatttcaagcgctttaatgtcaatggcagaaaaggaaatatcttcgtttcaaaactagacagaatcattcccacaaactgcgttgtgatgtgttcgttcaactcacagagtttaacctttcttttcatagagtagttaggaaacagtctgtttgtaaattctgtacgtggatattctgacatcttgtggccttcgttggaaacgggatttcttgatattctgctagacagaagaattctcactaacttccttgtgttgtgtgtattcaactcacagagttgaacgatcctttacacagaggagacttgaaacactctttttgtggaatttgcaagtggagatttcagccgctttgaggtcaatggtagaaaaggaaatatcttcgtataaagactagacagaatgattctcagaaactcctttgtgatgtgtacgttcaactcacagagtttaacctttcttttcatagagcagttaggaaacactctgtttgtaaagtctgcaagtggatattgagacctctttgaggccttcgttggaaacgggtttttttcatataaggctagacagaagaattctaagtaacttccttgtgttgtgtgtattcaactgacagagttgaactttcatttagagagagcagatttgaaacactgttttggtggaatttgcaagtggagatttcaagcgatttggggccaaaggcagaaaaggaaatatcttcgtataaaaactagacagaatcattctcaaaaactgctgcgtgatgtttgcgttcaactctcagagtttaacttttcttttcattcagcggtttggaaacactctgtttgtaaagtctgcacgtggatattttgaccacttagaggccttcgttggaaacgggtttttttcatgtaaggctagacagaagaattcgcagtaacttccttgtgttgtgtacattcaactcacagagttgaacgttcccttagacagagcagatttgaaacactctttttgtgcaattggcaaatggagatttcaagcgctttaaggtcaatggcagaaaaggaaatatcttcgtttcaaaactagacagaatgattctcataaactcctttgtgatgtatgcgttcaactcacagagtttaacctttcttttcatagagcagttaggaaacactctgtttgtaaagtctgcaagtggatattcagacctccttgaggccttcgttggaaacgggatttcttcatattatgctagacagaataattctcagtaacttccttgtgttgtgtgtattcaactcacagagttgaatgatcctttacacagagcagacttgaaacactctttttgtggaatttgcaagtggagatttcagccgctttgaggtcaatggtagaaaagtaaatatcttcgtatgaagactagacagaatgattctcagaaactcctttgtgatgtgtgcgttcaactcacagagtttaacctttcttctcatagagcagttaggaaacactctgtttgtaaagtctgcaagtggatattcagacctctttgaagccttcgttggaaacgggatttcttcatattatgctagacagaagatttcccagtaacttccttgtgttgtgtgtgttcaactcacagagttgaactttcatttacacagagcagatttgaaacactctttttgtggaatttgcaaatggagatttcaagcgctttgaggccaaaggcagaaaaggaaatatcttcgtataaaaactagacagaatcattctcagaaactgctctgcgatgtgtgcgttcaactctcagagtttaacttttcttttcattcagcagtttggaaacactctgtttgtaatgtctgcacgtggatattttgaccacttagaggccttcgttggaaacgggtttttttcctgtaaggctagacagaagaattcccagtaacttccttgtgttgtgtacattcaactcacagagttgaacgttcccttagacagagcagatttgaaacactctttttgtgcaattagcaagtggagatttcaagcgctttaaggtcaatggcagaaaaggaaatatcttactttcaaaactagacagaatcattcccacaaactgcgttgtgatgtgttcgttcaactcacagagtttaacctttcttttcatagagcagttaggaaacactctgtttgtaaattctgtaagtggatattctgacatcttgtggccttcgttggaaacgggatttcttcatattctgctagacagaagaattcctcagtaacttcccttgtgttgtgtgtattcaactcacagagttgaacgatcctttacacagagcagacttgaaacactcgttttgtggaatttgcaagtggagatttcagccgcgttgaggtcaatggtagaaaaggaaatatcttcgtataaaaactagacagaatgattctcagaaaatcctttgtgatgtgtgcgttcaactcacagagtttaacttttcttttcatggagcagttaggaaacactctgtttgtaaagtctgcaagtgaatattcagacctctttgaggccttcgttggaaacgggatttcttcatattatgctagacagaataattctcagtaacttccttgtgttgtgtgtattcaactcacagagttgaacgatcctttacagagagcagacttgaaacactctttttgtggaatttgcaagtggagatttcagccgctttgaggtcaatggtagaataggaaatttcttcctatagaaactagacagaatcattctcagaaactgctctgcgatgtgtgcgttcaactctcacagtttaacttttcttttcattcagcagtttggaaacactctgtttgtaaagtctgcacgtggataatttgaccacttagaggccttcgttggaaacgggtttttttcatgtaaggctacacagaagaattcccagtaacttccttgcgttgtgtacattcaactcacagagttgaacgttcccttagacagagcagatttgaaacactctttttgtgcaattggcaagtggagatttcaagcgctttaaggtcaatggcagaaaaggaaatatcttcgtttcaaaactagacagaatcattcccacaaactgcgttgtgatgtgttcgttcaactcacagagtttaaccattcttttcatagagcagttaggaaacagtctatttgaaaattctgtaagtggatattctgacatcttgtggccttcgttggaaacgggatttcttcatattctgctagacagaggaattctcaggaacttccttgtgttgtgtgtattcaactcacagagttgaacgaccctttacacagagcagacttgaaacactctttttgtggaatttgcaagtggagatttcagccgctttgagttcaaatgtagaataggaaatatcttcctatagaaagtacacagaatgattctcagaaaatcctttgtgatgtgtgccttcaactcacagagtttaacttttcttttcatcgagcagttaggaaacactctgtttgtaaagtctgcaagtggatattcagacgtctttgaggccttcgttggaaacgggatttcttcatattatgctagacagaagaattcccagtaacttccttgtgttgtgtgtgttcaactcacagagttgaactttcatttacacagagcagatttgaaaccctctttttgtggaatttgcaaatggagatttcaagcgctttgaggccaaaggcagaaaaggaaatatcttcgtataaaaactagacagaatcattctcagaaactgctctgcgatgtgtgcattcaactctcagagtttaatttttcttttcattcagcagtttggaaacattctctttgtaaagtctgcacgtggatattttgacaacttagaggccttcgttggaaacgggttttattcttgtaaggctagacagaagaattcccagtaacttccttgtgttgtgtgcattcaactcacagagctgaacgttcccttagacagagcagatttgaaacactctatttgtgcaatttgcaagtgtagatttcaagcgctttaaggtcaatggcagaaaaggaaatatcttcgtttcaaaactagacagaatcattcccacaaactgctttgtgatgtgttcgttcaactcacagagtttaaactttcttttcatagagcagttaggaaacagtctgtttgtcaattctgtaagtggatattctgacatcttgtggccttcgttggaaacgggatttcttcatattctgctagacagaagaattctcagtaacttccttgtgttgtgtttattcaactcacagagttgaatgatcctttacacagagcagacttgaaacactctttttgtggaatttgcaagtggagatttcagccgctttgaggtcaatgttagaaaaggaaatatcttcgtataaagactagacagaatgattctcagaaactcctttgtgatgtgtgcgttcaactcacagagtttaacttttcttttcatagagcagttaggaaacactctgtttgtaaagtctgcaagtggatattcagacctctttgagtccttcattggaaacgggatttcttcatattatgctagacagaagaattctcagtaacttccttgtgttgtgtgtattcaactcacagagttgaacgatcctttacactgagcagacttgaaacattctttttgtggaatttgcaagtggagatttcagccgctttggggtcaatggtagaataggaaatatcttcgtagaagaactagacagaatcattctcagaacctgctgcgcgatgtgtgcgttcaactctcagagtttaacttttcttttcattcagcggtttggaaacactctgtttgtaaagtctgcacgtggatattttgaccacttagagtccttcgttggaaacgggtttttttcatgtaaggctagacagaagaattcccagtaacttccttgtgttgtgtacattcaactcacagagttgaacgttcccttagacagagcagatttgaaacactctttttgtgcaattggcaagtggagatttcaagcgctttaaggtcaatggcagaaaaggaaatatcttcgtttcaaaactagacagaatcattcccagaaactgcgttgtgatgtgttcgttcaactcacagagtttaacctttcttttcatagagcagttaggaaacactctgtttgtaaagtctgtaagtggatattctgacgtcttgtggccttcgttggaaacgggatttcttcatattctgctagacagaagaattctcagtaacttccttgtgttgtgtgtattcaactcacagagttgaatgatcctttacacagaacagacttgaaacactctttttgtggaatttgcaagtggagatttcagccgctttgaggtcaacggtagaataggaaatatcttcctatagaaactagacagaatgattctcagaaactgctttgtgatgtgtgcgttcaactcacagagtttaaccttccttttcatagagcagttaggaaacactctgtttgtaaaatctgcaattggatattcagacctctttgaggccttcgttgcaaacgggatttctttatgttatgctacacagaagaattctcagtaacttccttgtgttgtgtgtattcaactcacagagttgaactttcatttacacagagcagattggaaacactcttttgtggaatttgcaagtggagatttcaagcgctttgaggccaaaggcagaaaaggaaatatcttcgtataaaaactagacagaatcattctcagaaactgctctgcgatgtgtgcgttcaactctcagagtttaacttttcctttcattcagcagtttggaaacactctgtttgtaaagtctgcacgtgcataatttgaccacttagatgccttcgttggaaacgggttttttccatgtaaggctagacagaagaattctcagtaacttccttgtgttgtgtgtattcaactcacagagttgaacgatcctttacacagagcagacttggaacactctttttgtggaatttgcaagtggagatttcagccgctttgaggtccatggtagaaaaggaaatatcttcgtataaaaaccagacagaatcattcccacaaacttgggttgtgatgtgttcgttcaactcacagagtttaacctttcttttcatagagcagttaggaaacagtctgtttgtcaattctgtaagtggatattctgacatcttgtggccttcgttggaaacgggatttcttcatattctgctagacagaataattctcagtaacttccttgtgttgtgtgtattcagctcacagagttgaacgatcctttacacagagcagacttgaaacactctttttgtggaatttgcaagtggagatttcagccgctttgaggtcaatagtagaaaaggaaatatcttcgtagaaaaacaagacagaatgattctcagaaactcctttgtgatgtgggcgttcaactcacagagtttaacctttcttttcatagagcagttaggaaacactctgtttgcaaagtctgcaagtggatattcagacctctttgacgccttcgttggaaacgggatttcttcatattctgctagacagaagaattctcagtaacttctttgtgttgtgtgtattcaactgacagagttgaactttcatttagagagagcagatttgaaacactgtttttgtggaatttgcaagtggagatttcaagcgctttggggccaaaggcagaaaaggaaatatcttcttataaaaactagacagaatcattctcagaaaccgctctgtgatgtgtgcgttcaactcgcagagtttaacttttcttttcattcagcagtttggaaacactctgtttgtaaagtctgcacgtggatattttgaccacttagaggccttcgttggaaacgggttttttttcatgtaaggctagacagaagaattcccagtaacttccttgtgttgtgtgcattcaactcacatagttgaacgttcccttagacagagcagatttgaaacactctatttgtgcaatttgcaagtgtagatttcaagcgctttaaggtcaatggcagaaaaggaaatatcttcgtttcaaaactagacagaatcattcccacaaactgcgttgtgatgtgttcgttcaactcacagagtttaacctttctgttcatagagcagtgaggaaacactctgtttgtaaagtctctaagtggatattctgacatcttgtggccttcgttggaaacgggatttcttcatattctgctagacagaagaattctcagtaacttccttgtgttgtgtgtattcaactcacagagttgaacgatcctttacacagagcagaattgaaacattctttttgtggaatttgcaagtggagatttcagccgctttgaggtcaatggtagaataggaaatatgttcctatagaaactagacagaatgattctcagaaactcctttgtgatgtgtgtgttcaactcacagagtttaacctttcttttcctagagcagttagtaaacactctgtttataaagtctgcaagtggatattgagacccctttgaggccttcgttggaaacgggatttcttcatattatgctagacagaagaattcccagtaacttccttgtgttgtgtgtgttctactcacagagttgaactttcatttacacagagcagatttgaaacactctttttgtggaatttgcaaatggagatttcaagcgctttgaggccaaaggcagaaaaggaaatatcttcgtataaaaactagacagaatcattctcagaaactgctctgcgatgtgtgcgttcaactctcagagtttaacttttcttttcattcagcagtttggaaacactctgtttgtaaagtctgcacgtggataatttgaccacttagaagccttcgttggaaacgggtttttttcatgtaaggctagacagaagaattctcagtaacttcccttgtgttgtgtgtattcaactcacagagttgaacgatcctttacacagagcagacttgtaacactctttttgtggaatttgcaagtggagatttcagccgctttgatgtcaaaggtagaaaaggaaatatcttcctataaaaactagacagaatgattctcagaaactcctttgtgatgtgtgcgttcaactcacagtttaacctttcttttcatagagcagttaggaaacactctgtttgtaaagtctgcaagtggatattcagacctctttgaggctttccttggaaacgggatttcttcctattctgctagacagaataattctcagtaacttccttgtgttgtgtgtattcaactcacagagttgaacgatcctttacacagagcagacttgaaacattctttttgtggaatttgcaactggagatttcagccgctttgaggtcaatggtagaataggaaatatcttcctatagaaactagacagaatgattctcagaaactcctttgtgatgtgtgcgttcaactcacaaagtttaacctttcttttcatagagcagttaggaaacactctgtttgtaaagtctgcaagtggatattcagacctctttgaggccttcgttggaaacgggatttgttcatactatgctagacagaagaattctcagtaacttccttgtgttgtgtgtattcaacttacagagttgaactttcatttagagagagcagatttgaaacactgtttttgtggaatttgcaattggagatttcaagcgctttggggccaaaggcagaaaaggaaatatcttcgtataaaaactagacagaatcattctcagaaactgctgcgtgatgtgtgcgttcaactctcagagtttaacttttcttttcattcagcggtttcgaaacactctggttgtaaagtctgcacgtggatattttgaccacttagagtccttcgttggaaacgggttttttgcatgtaaggctagacagaagaattcccagtaacttccttgtgttgtgtgcattcaactcacagagttgaacgttcccttagacagagcagatttgaaacactctatttgtgcagtttgcaagtgtagatttcaagcgctttaaggtcaatggcagaaaaggaaatatcttcgtttcaaaactagacagaatgattctcagaaactcctttgtgatgtgtgcgttcaactcacagagtttaacctttcttttcatagagcagttaggaaacactctgtttgtaaagtctgcaagtggatattcagacatccttgaggctttctttggaaacgggatttcttcatattctgctagaaagaagaattctcagtaacttccttgtgttgtgtgtattcaactcacagagttcaacgatcctttacacagagtagacttgaaactctttttgtggaattggcagggtggagatttcagccgctttgaggtcaatggtagaaaaggaaatatcttcgtataaaaactagacagaatgattctcagaaactgctttgtgatgtgtgcgttcaactcacagagttcaacctttcttttcatagagcagttagggaacactctgtttgtaaagtctgcaagtggatatccagacctctttgaggccttcgttggaaacgggttttcttcatattatgctagacagaagaattctcagtaacttccttgtgttgtgtgtattcaactgacagagttgaactttcatttagagagagcagatttgaaacactgtttttgtggtatttgcaagtggagatttcaagcgctttggggccaaaggcagaaaaggaaatatcttcgtataaaaactagacagaatcattctcagaaactgctgcgtgatgtgtgcgttcaactctcagagtttaacttttcttttcattcagcggtttggaaacactctgtttgtaaagtctgcacgtggatattttgaccacttagaggccttcgttggaaacgggttttatgcatgtaagcctagacagaagaattcccagtaacttccttgtgttgtgtgcattcaactcacagagttgaacgttcccttagacagtgcagatttgaaacactctatttgtgcaatttgcaagtgtagatttcaagcgctttaaggtcaatggcagaaaaggaaatatcttcgtttcaaaactagacagaatcattcccacaaactgcgttgtgatgtgttcgttcaactcacagagtttaacctttcttttcatagagcagttaggaaacagtctgtcaattctgtaagtggatattctgacatcttgtggccttcgttggaaacgggatttcttcatattctgctagacagaagaattctcagtaacttccttgtgttgtgtgtattcaactcacagatttgaacgatcctttacacagagcggagttgaaacactctttttgtggaatttgcaagtggagatttcagccgcgttgaggtcaatggtagaaaaggaaatatcttcgtataaaaactagacagaatgattctcagaaacttctttgtgatgtgtgcgttcaactcacagagtttaacctttcttttcatagagcagttaggaaacactctgtttgtaaactctgcaagtggatattcagacctctttgaggccttggttggaaacgggatttcttcatactatgctagacagaagatttctaagtaacttccttgtgttgtgtgtattcaactgacagagtttaactttcatttagagagagcagatttgaaacactgttttcgtggaatttgcaagtggagatttcaagcgctttggggccaaaggcagtaaaggaaatatcttcgtataaaaactagacagaatcattctcagaaactgctctgtgatgtgtgcgttcaactctcagagtttaacttttgttttcattcagcagtttggaaacactctgtttgtaaagtctgcacgtggatattttgaccacttagaggccttcgttggaaactggtttttttcaagtaaggctagacagaagaattcccagtaacttccttgtgttgtgtgcattcaactcaaagagttgaacgttcccttagacagagcagatttgaaacactctatttgtgcaatttgcaagtgtagatttcaagcgctttaaggtcaatggcagaaaaggaaatatcttcgtttcaacacaagacagaatcattcccacaaactgcgttgtgatgtgttcgttcaactcacagagtttaacctttctgttcatagagcagttaggaaacactctgtttgtaaagtctgtaagtggatattctgacatcttgtggccttcgttggaaaagggatttcttcatattctgctagacagaagaattctcagtaacttccttgtgttgtgtttattcaactcacagagttgaacgatcctttacacagagcagacttgaaacactctttttgtggaatttgcaagtggagatttcagccgctttgaggtcaatggtagaaaagtaaatatcttcgtataaagactagacagaacgattctcagaaactcctttgtgatgtgtgcgttcaactcacagagtttaacctttcttttcatagagcagttaggaaacactctgtttgtaaagtctgtaagtggatattctgacattttctggccttcattggaaaagggatttcttcatattctgctagacagaagaattctcagtaacttccttgtgttgtgtgtattcaactcacagagttgaatgatcctttacagagatcagacttgaaacactctttttgtggaatttgcaagtggagatttcagccgctttgaggtcaatggtagaatagaaatatcttcctatagaaactagacagaatcattctcagaaagtgctctgcgatgtgtgcgttcaactctcagagtttaacttttcttttcattcagcagtttggaaacactctgtttgtaaagtctgcacgtggatattttgaccacttagaggccttcgttggaaacgggtttttttcctgtaaggctagacagaagacttcccagtaacttccttgcgttgtgtacattcaactcacagagttgaacgttcccttagacagagcagatttgaaacactctttttgtgcaattggcaagtggagatttcaagcgctttgaggtcaatggcagaaaaggaaatatcttcgtttcaaaactagacagaatcattcccacaaactgcgttgtaatgtgtgcgttcaactcacagagtttaacctttcttttcatagagcagttaggaaacactctgtttgtgaagtctgcaagtggatattcagacctctttgaggccttcgttggaaacgggatttcttcatattctgctagacagaagaattctcagtaacttccttgtgttgtgtgtattcaactcacagagttgaacgatcctttacacagagcagacatgaaacactctttttgtggaatttgcaggtggagatttcagccgctttgaggtcaatggtagaataggaaatatcttcctatagaaactagacagaatgattctcggaaactcctttgtgatgtgtgcgttcaactcacagagtttaacctttcttttcatagagcagttaggaaacactctgtttgtaaagtctgcaagtggatattcagacctctttgaggccttcgttggaaacgggtttttttcatataaggctagacagaagaattctcagtaacttccttgtgttgtgtgtattcaactgacagagttgaactttcatttagagagagcagatttgaaacactctttttgtggaatttgcaagtggagatttcaagcgctttggggccaaaggcagaaaacgaaatatcttcgtataaaaactagacagaatcattctcagaaactgctctgcgatgtgtgcgttcaactctcagagtttaacttttcttttcattcagcagtttggaaacactctgtttgtaaagtctgcacgtggataatttgaccacttagaggccttctttggaaacgggttttttttcatataaggctagacagaagaattcccagtaacttccttgcgttgtgtacattcaactcacagagttgaacgttcccttagacagagcagatttgaaacactctttttgtgcaattggcaagtggagatttcaagcgctttaaggtcaatggcagaaaaggaaatatcttcgtttcaaaactagacagaatcattcccacaaactgcgttgtaatgtgtgcgttcaactcacagagtttaacctttcttttcatagagcagttaggaaacactctgtttgtaaagtctgcaagtggatattcagacctctttgaggccttcgttggaaacgggatttcttcgtattctgctagacagaggaattctcagtaacttccttgtgttgtgtgtattcaactcacagagttgaacgatcctttacacagagcagacttgaaacactctttttgtggaatttgcaagtggagatttcagccgctttgaggtcaatggtagaataggaaatatcttcctatagaaactagacggaaatgattctcagaaactcctttgtgatgtgtgtgttcaactcacagagtttaacctttcttttcatagagccgttaggaatcactctgtttgtaaagtctgcaagtggatattcagacctctttgaggccttcgttggaaacgggtttttttcatataaggctagacagaagaattctcagtaacttccttgtgttgtgtgtgttcaactcacagagttgaactttcatttacacagagcagatttgaaacactctttttgtggaatttgcaagtggagatttcaagcgctttgaggccaaaggcagaaaaggaaatatcttcgtataaaaactagacagaatcattctcagaaactgctgcgtgatgtgtgagttcaactctcagagtttaacttttcttttcattcagcggtttggaaacagtctgtttgtaaagtctgcacgtggatattttgaccacttagaggccttcgttggaaacgggattttttcatgtaaggctagacagaagaattcccagtaacttccttgtgttgtgtgcattcaactcacagagttgaacgttcccttagacagagcagatttgaaacactctatttgtgcaatttgcaagtgtagatctcaagcgctttaaggtcaatgggagaaaaggaaatatcttcgtttcaaaactagacagaatcattcccacaaactgcgttgtgatgtgttcgttcaactcacagagtttaaactttctgttcatagagcagttaggaaacactctgtttgtaaagtctgtaagtggatattctgacatcttgtggccttcgttggaaacgggatttcttcatattctgctggacagaagaattctcagtaacttccttgtgttgtgtgtattcaactcacagagttgaacgatcctttacacagagcagacttgaaacactctttttgtggaatttgcaagtggagatttcagccgctttgagttcaatggtagaataggaaatatcttcctatagaaagtacacagaatgattctcagaaactcctttgtgatgtgtgcattcaactcacagagtttaacctttcttttcatagagcagttaggaaacactgtttgtaaagtctgcaagtggatattcagacctccttgaggccttcgttggaaacgggatttcttcatattatgctagacagaagaattctcagtaacttccttgtgttgtgtgtattcaactgacagagttgaactttcatttagagagagcagatttgaaacactgtttttgtggaatttgcaagtggagatttcaagcgctttggggccaaaggcagaaaagaaaatatcttcgtataaaaactagacagaatcattctcagaaactgctctgcgatgtgtgcgttcaactctcagagtttaacttttcttttcattcagcagtttggaaacactctgtttgtaaagtctgcacgtggataatttcaccacttagaggtcttcgttggaaacgggtttttttcatgtaaggatagacagaagaattctcagtaacttccttgtgttgtgtgtattcaactcacagagttgaacgatcctttacacagagcagacttgtaacactctttttgtggaatttgcaagtggagatttcagccgctttgaagtcacaggtagaaagggaaatatcttcctataaacactagacagagtgattctcagaaacttctttgtgatgtctgcgttcaactgacagagtttaacctttcttttcatagagcagttaggaaacactctgtttgaaaagtctgcaagtggatactcagacctccttgaggccttcgttggaaacgggatttcttcatattatgctagacagaggaattctcagtaacttccttgtgttgtgtgtattcaactcacagagttgaacgatcctttacacagagcagacttgaaacactctttttgtggaatttgcaagtggagatttcagccgctttgaggtcaatggtagaataggaaatatcttcctacagaaactagacagaatgattctcagaaactcctttgcgatgtgtgcgttcaactcacagagtttaacctttcttttcatagagcagttaggaaacactctgtttgtaaagtctgcaagtggatattcagacatctttgaggctttcgttggaaacgggatttcttcatattctgctagacagaagaattctcagtaacttccttgtgttgtgtgtattcaagctgacagagttgaactttcatttagagagagcagatttgaaacactgtttttgtggaatttgcaaatggagatttcaagcgctttgggaccaaaggcagaaaaggaaatatcttcgtataaaaactagacagaatcattctcagaaactgctgcgtgatgtgtgcgttcaactctcagagtttaacttttcttttcattcagcggtttggaaacactctgtttgtaaagtctgcacgtggaaattttgaccacttagaggccttcgttggaaacgtgtttttttcatgtaaggctagacagaagaattcccagtaacttccttgtgttgtgtgcattcaactcacagagttgaacgttcccttagacagagcagatttgaaacactctatttgtgcaatttgcaagtgtagttttcaagctctttaaggtcaacggcagaaaaggaaatatcttcgtttcaaaactagacagactcattcccaaaaactgcgttgtgatgtgttcgttaaactcacagagtttaacctttctgttcatagagcagttaggaaacactctgtttgtaaagtctgtaagtggaaattctgacatcttgtggccttcgttggaaacgggatttcttcatattatgctagacagaagaattctcagtaacttccttgtgttgtgtgtattcaactcacagagttgaacgatcctttacacagagcagacttgaaacactctttttgtggaatttgcaagtggagatttcagctgctttgaggtcaatggtagaataggaaatatcttcctatagaaactagacagaatgattctcataaactcctttgtgatgtgtgcgttcaactcacagagtttaacctttcttttcatagagcagttaggaaacactctgtttgtaaagtctgcaagtggatattcagacatccttgaggctttcgttggaaacgggatttcttcatattctgctagaaagaagaattctcggtaacttccttgtgttgtgtgtattcaactgacagagttgaactttcatttagagagagcagatttgaaacactgtttttgcggaatatgcaagtggagatttcaagcgctttggggccaagggcagaaaaggaaatatcttcgtttaaaaactagacagaatcattctcagaaactgctgcgtgatgtgtgcgttcaactctcagagtttaacttttcttttcattcagtggtttggaaacactctgtttgtaaagtctgcacgtggatattttgaccacttagaggctttcgttggaaacgggtttttttcatgtaaggctagacagaataattcccagtaacttctttgtgttgtgtacattcaactcacagagttgaacgttcccttagacagagcagatttgaaacactctttttgtggaattggcaagtggagatttcaagcgctttaaggtcagtggcagaaaaggaaatatcttcgtttcaaaactagacagaatcattcccaaaaactgcgttgtgatgtgttccttcatctcagagagtttaacctttcttttcagagagcagttaggaaacagtctgtttgtaaattctgtaagtggatattctgacatcttgtggccttcgttggaaacgggatttcttcatattctgctagacagaagaattctcagaatcttccttgtgttgtgtgtattcaactcacagagttgaacgatggtttactcagagcagatttgaaacactctttttgtggaatttgcaagtggagatttcagccgctttgaggtcaatggtagaaaaggaaatatcttcgtataaaaactagacagaatgattctcagaaactcctttgtgatgtgtgcgttcaactcacagagtttaacttttcttttcatagagcagttaggaaacactctgtgtgtaaagtctgcaagtggatattcagacctctttgaggccttcgttggaaacgggatttctccatattatgctagacagaagaattctcagaatcttccttgtgttgtgtgtattcaacgcacagagttgaacgatcctttacacagagcagacttgaaacactctttttgtggaatttgcaagtggagatttcagccgctttgaggtccatggtagaaaaggaaatatcttcgtataaaaactagacagaatgattctcagaaactccttggtgatgtgggcgttcaactcacagagtttaacctttcttttcatagagccgttaggaaacactctgtttgtaaagtctgcacgtggatatttggacttctttgaggccttcgttggaaacgggtttttttcatgtaaggctagacggaagaattctcagtaacttccttgtgttgtgtgtattcaactgacagagttgaactttcatttagagagagcagatttgaaacactgtttttgtggaatttgcaagtggagatttcaagcgctttggggccaaaggcaggaaaggaaatatcttcgtataaaaactagacagaatcattctcagaatctgctgcgtgatgtgtgcgttcaactctcagagtttaacttttcttttcattcagcggtttggaaacactctgtttgtaaagtctgcacgtggatattttgaccacttagaagccttctttggaaacggtttttcttcatgtaaggctagacagaagaattcccagtaacttccttgtgttgtgtgcattcaactcacagagttgaacgttcccttagacagagcagatttgaaacactctatttgtgtaatttgcaagtgtagatttcaagcgctttaaggtcaacggcagaaaaggaaatatcttcgtttcaaaattagacaggatcattcccacaaactgcgttgtgatgtgttcgttcaactcacagagtttaacctttcttttcatagagaagttaggaaacactctgtttgtaaagtctgcaagtggatattcagacttccttgaggccttcgttggaaacgggatttcttcatattctgctagacagaagaattctcagtaacttccttgtgttgtgtgtattcaactcacagatttgaatgatcctttacacagagcagacttgaaacactctttttgtggaatttgcaagtggagatttcagccgctttgagttcaatggtagaataggaaatatcttcctatagaaactagacagaatgattctcagaaactcctttgtgatgtgtgcgttcaactcacagagtttaacctttcttttcatagagcagttaggaaacactctgtttgtaaagtcagcaactggatattcagacctccttgtggccttctttggaaacgggatttcttcatattatgctagacagaagaattctcagtaacttccttgtgttgtgtgtattcaactgacagagttgaactttcatttggagagagcagatttgaaacactgtttttgtggaatttgcaagtggagatttcaagcgctttggggccaaaggcagaaaaggaaatatcctcgtataaaaacaagacagaatcattctcagaaactgctgcgtgatgtgtgcgttcaactctcagagtttaacttttcttttcattcagcggtttggaaacactctgtttgtaaagtctgcacgtggatattttgaccacttagaggtcttcgttggaaacgggttttttttaatgtaaggctagacagaagaattcccagtaacttccttgtgttgtgtgcattcaactcacagagttgaacgttcccttagacagagcagatttgaaacactctatttgtgcaatttgcaagtgtagttttcaagctctttaaggtcaacggcagaaaaggaaatatcttcgtttcaaaactagacagaatcattcccacaaactgcgttgtgatgtgttcgttcaactcacagagtttaacctttcttttcatagagcagttaggaaacagtctgtttgtcaattctgtaagtggatattctgacatcttgtggccttcgttggaaacaggatttcttcatattctgctagacagaagaattctcagtaacttccttctgttgtgtgtattcaactcacagagttgaacgatcctttacacagagcagacttgaacacaactctttttgtggaatttgcaagtggagatttcagccgctttgaggtcaatagtagaaaaggaaatatcttcgtagaaaaactagacagaatgattctcagaaacttctttgtgatgtgtgcgttcaactcacagagtttaacctttcttttcatagagcagttaggaaacactctgtttgtaaactctgcaagtggatgttcagacctctttgaggccttcgttggaaacgggatttcttcatactatgctagacagaagaattcccagtaacttccttgtgttgtgtgtgttcaactcacagagttgaactttcatttacccagagcagattcgaaacactctttttgtggaatttgcaagtggagatttcaagcgctttgaggccaaaggcagaaaaggaaatatcttcgtttcaaaactagacagaatcattctcagaaactgctctgcgatgtgtgcgttcaactctcagattttaacttttcttttcattcagcagtttggaatcactctgtttgtaaagtctgcacgtggatattttgaccacttagaggccttcgttggaaacgggtttttttcctgtaaggctagacagaagaattcccagtaacttccttgcgttgtgtacattcaactcacagagttgaacgttcccttagacagagcagatttgaaacactctttttgtgcaattggcaagtggagatttcaagcgctttaaggtcaatggcagaaaaggaaatatcttcgtttcaaaactagacagaatcattcccacaaactgcgttgtgatgtgttcgttcatctcacagagtttaacctttcttttcatagagcagttaggaaacactctgtttgtaaattctgtaagtggatattctgacatcctggtggccttcgttggaaacgggatttcttcatattctgctagacagaagaattctcagaaacttccttgtgttgtgtgttttcaactcacagagttgaacgatcctttacacagagcagacttgaaacactccttttgtggaatttgcaagtggagatttcagccgctttgaggtcaatggcagaataggaaatatcttcctatagaaactagacagaatgattctcagaaactcctttgagatgtgtgtgttcaactcacagagtttaacctttcttttcatagagcagttaggaaacactctgtttgtaaagtctgcaggtggatattcagacctctttgaggccttcgttggaaacgggtttttttcatataaggctagacagaagaattcccagtaacttccttgtgttgtgtgtgttcaactcacagagttgaactttcatttacagagagcaggtttgagacacactttttgtggaatttgctaatggagatttcaagcgctttgaggccaaaggcagaaaaggaaatatcttcgtataaaaactagacagaatcattctcagaaactgctgcgtgatgtgtgcgttcaactctcagagtttaacttttcttttcattcagcggtttggaaacactctgtttgtaaagtctgcacgtggatattttgaccacttagaggccttcgttggaaacgggtttttttcatgtaaggctagtcagaagaattctcagtaactgccttgtgttgtgtttattcaactcacagagttaaacgatcctttacacagagcagacttgaaatactctttttgtggaatttgcaagtggagatttcagccgctttgaggtcaatggtagaataggaaatatcttcctatagaaactagacagaatgattctcagaaactcctttgtgatgcgtgcgttcaactcacagagtttaacctttcttttcatagagcagttaggaaacactctgtttgtaaagtctgcaagtggatattcagacatccttgaggctttcgttggaaacgggatttcttcgtattctgctagaaagaagaattctcagtaacttccttgtgttgtgtgtattcaactcacagagttgaacgatcctttacacagagcagacttgaaacactctttttgtggaatttgcaagtggagatttcagccgatttgaggtcaatggtagaaaaggaaatatcttcgtataaagactagacagaatgattctcagaaactcctttgtgatgtgtgcgttcaactcacagagtttaacctttcttttcatagagcagttaggaaacactctgtttgtaaagtctgcaagtggatattcagacctccttaaggccttcgttggaaacgggatttcttcatattatgctagacagaagaattctcagtaacttccttgtgttgtgtgtattcaactcacagagttcaacgatcctttacacagagcagacttgaaacactctttttgtggaatttgcaagtggagatttcagccgctttgaggtcaatggtagaataggaaatatcttcccatagaaactagacagaatgattctcacaaactcctttgtgatgtgtgcgttcaactcacagagttaaacctttcttttcatagagcagttaggaaacactctgtttgtaaagtctgcaagtggatattcagacctccttgaggccttctttggaaaggggatttcttcatattatgctagacagaagaattctcagaaacttccttgtgttgtgtgtattcaactctcagagttgaacgaccctttacacagagcagacttgaaacactctttttgcggaatttgcaagtggaggtttcagccgctttgaggtcaatggtagaaaaagaaatatcttcgtatgaaaactagacagaatgattgtcagaaactcctttgttatgtgggcatttaactcacagagtttaaccgttcttttcatagagcagttaggaaacactctgtttgtaacgtctgcaagtggatattcagacatatttgaggccttctttggaaacgggatttcttcatattatgctacacagaagaattctcagtaacttccttgtgttgtgtgtattcaactcacagagttgaaggatcctttacacagagcagtcttgaaatactctttttgtggaatttacacgtggagatttctgccgctttgatgtcaatggtagaataggaaatatcttcgtatagaaactagacagaatgattctcagaaactcctttgtgatgtgtgcgttcaactcacagtgtttaacctttcttttcatagagcagttaggaaacactctgtttgtaaagtctgaaagtggatattcagacctctttgaggccttcgttggaaacgggtttttttcatataaggctagacagaagaattctcagtaacttccttgtgttgtgtgtattcaaatgacagagttgaactttcatttagagagagcagatttgaaacactgtttttgtggaatttgcaagtggagatttcaagcgctttggggccaaaggcagaaaaggaaatatcttcgtataaaaactagacagaatcattctcagaaactcctgcgtgatgtgtgcgtccaactctcagagtttaacttttcttttcattcagcggtttggaaacactctgtttgtaaagtctgcacgtggatattttgaccacttagaggccttcgttggaaacgggtttttttcatgtaaggctagacagaagaattcccagtaacttcccttgtgttgggtgcattaaactcacagagttgaacgttcccttagacagagcagatttgaaacactctatttgtgcaatttgcaagtgtagatttcaagcgctttaaggtcaatggcagaaaaggaaatatcttcgtttcaaaactagacagaatcattcccacaaactgcgttgtgatgtgttcgttcaactcacacagtttaacctttctgttcatagagcagttaggaaacactctgtttgtaaagtctgtaagtggatattctgacatcttgtggccttcgttggaaacgggatttcttcatattctgctagacagaacaattctcagtaacttccttgtgttgtgtgtattcaacttacagagttgaacgattctttacacagagcagacttgaaacactctttttgtggaatttgcaagtggagatttcagccgctttgaggtcaatggtagaaaaggaaatatcttcgtataaagactagacagaatgattctcagaaactcctttgtgatgtgtgcgttcaactcacagagtttaacctttcttttcatagagcagttgggaaacactctgtttgtaaagtctgcaagtggatattcagacctccttgaggccttcgttggaaatgggatttcttcatattatgctagacagaagaattctcagtaacttccttgtgttgtgtgtattcaactgacagagttgaactttcatttagagagagcagatttgaaacactgtttttgtggaatttgcaagtggagatttcaagagctttggggccaaaggcagaaaaggaaatgtcttcgtataaaaactagacagaatcattctcagaaactgctctgcgatgtgtgcgttcaactctcagagtttaaattttcttttcattcagcagtttggaaacactctgtttgtaaagtctgcacgtggatattttgaccacttagaggccttcgttggaaacgggtttttttcctgtaaggctagacagaagaattcccagtaacttccttgtgttttgtacattcaacccacagagttgaacgtttccttagacagagcagatttgaaacactttttgtgcaattggcaagtggtgatttcagccgctttgaggtcaaaggtagaaaaggaaatatcttcctataaaaactagacagaatcattcccacaaactgcgttgtgatgtgttcgttcaactcacagagtttaacctttcttttcatagagcagttaggaaacactctgtttgtaaactctgcaagtggatattcagacctctttgaggccttcgttggaaacgggatttctccatactgtgctagacagaagaattctcagtaacttccttgtgttgtgtgtattcaactcacagagttgaacgatcctttacacagagcagacttgtaacactctttttgtggaatttgcaagtggagatttcagccgctttgaagtcaaaggtagaaaaggaaatatcttcctataaaacctagacagaatgattctcataaactcctttgtgatgtgtgcattcaactcacagagtttcacctttcttttcatagagcagttaggaaacactctgtttgtaaagtctgcaagtggatattcagacctccttgaggccttcgttggaaacgggatttcttcttattctgctagacagaagaattccccagtaacttccttgtgttgtgtgtgttcaactcacagagttgaactttcatttacacagagcagatttgaaacactctttttgtggaatttgcaggtggagatttcaagcgctttgaggccaaaggcagaaaaggaaatatcttcgtataaaaactagacagaatcattctcagaaactgctgcgtgatgtgtgcgttcaactctcagagtttaacttttcttttcattcagcggtttggaaacactctgtttgtaaagtgtgcacgtggaaattttgaccacttagaggccttcgttggaaacgggtttttttcatgtaaggctagacagaagaattcccagtaacttcccttgtgttgtgtacattcaactcacagagttgaacgttcccttagacagagcagatttgaaacactctttttgtgcaattggcaagtggagatttcaagcgctttgaggtcaatggcagaaaaggaaatatcttcgtttcaaaactagacagaatcattcccacaaactgcgttgtgatgtgttcgttcaactcacagagtttaacttttctgttcatagagcagttagaaaacactctgtttgtaaagtctgcaagtggatattcagacctccttgaggccttcgttggaaacgggatttcttcatattctgctagacagaagaattctcagtaacttccttgtgtggtgtgtattcaactcacagagttgaacgatcctttacagagagcagacttgaaacactctttttgtgaaatttgcaagtggagatttcagccgctttgaggtcaatggtagaataggaaatatcttcctatagaaactagacagaatgattctcagaaactcctttgtgatgtgtgtgttcaactcacagagtttaacctttcttttcatagaacagttcgtaaacactctgtttataaagtctgcaagtggatattcagacccctttgaggccttcgttggaaacgggatttcttcatattatgctagacagaagaattctcagtaactttccttgtgttgtgtgtattcaactgacagagttgaactttcatttagagagagcagatttgaaacactgtttttgtggaatttgcaagtggagatttcaagcgctttggggccaagggcagaaaaggaaatatcttcgtataaaaactagacagaatcattctcagaaactgctctgcgatttgtgcgttcaactctcagagtttaactttccttttcattcagcagtttggaaacactctgtttgtaaagtctgcacgtggataatttgaccacttagaggccttcgttggaaacgggtttttttcatgtaaggctagacagaagaattctcagtaacttctttgtgttgtgtgtattcaactcacagagttgaacgatcctttacacagagcagacttgtaacactctttttgtggaatttgcaagtggagatttcagccgctttgaagtcaaaagtagaaaaggaaatatcttcctataaaaactagacagaatcattcccacaaactgcgttgtgatgtgttcgttcaactcacagagtttaacttttctgttcatagagcagttagaaaacactctgtttgtaaagtctgcaagtggatattcagacctccttgaggccttcgttggaaacgggatttcttcatattctgctagacagaagaattctcagtaacttccttgtgttgtgtgtattcaactcacagagttgaacgatcctttacacagagcagacttgaaacactctttttgtggaatttgcaagtggagatttcagccgctttgaggtcaatagtagaaaaggaaacatcttcgtagaaaaactagacagaatgattctgagaaatcctttgtgatgtgtgcgttcaactcacagagtttaacctttcttttcatagagcagttaggaaacactctgtttttaaagtcttcaagtggatattcagacctccttgaggccttcgttggaaacgggatttcttcatattatgctagacagaagaattcccagtaacttccttgtgttgtgtgtgttcaactcacagagttgaactttcatttacacagagcagatttgaaacactctttttgtggaatttgcaagtggagatttcaagcgctttgaggctaaaggcagaaaaggaaatatcttcgtataaaaactaggcagaatcattctcagaaactgctctgcgatgtgtgcgttcaactctcagagtttaacttttcttttcattcagcaatttggaaacactctgtttgtaaagtctgcacgtggatattttgaccacttagaggccttcgttggaaacgggtttctttcctgtaaggctagacagaagaattcccagtaacttccttgcgttgtgtacattcaactcacagagttgaacgttcccttagacagagcagatttgaaacactctttttgtgcaattggcaagtggagatttcaagcgctttaaggtcaatggcagaaaaggaaatatcttcgtttcaaaactagacagaatgattctcagaaactcctttgtgatgtgtgcgttcaactcacggagtttaacctttcttttcatagagcagttaggaaacactctgtttgtaaagtctggaagtggatattcagacatctttgaggctttcgttggaaacgggatttcttcatattctgctatacagaagaattgtcagaaacttccttgtgttgtgtgtcttcaactcacagagttgaacgatgctttacacagagtagacttgaaacactctttttctggaatttgcaagtggagatttcagccgctttgaggtcaatggtagaaaaggaaatatcttcgtataaaaactagacagaatgtttctcagaaactcctttgtgatgtgggcgttgaactcacagagtttaacctttcttttcatagagcagttaggaaacactctgtttgtaacgtctgcaggtggatatttggacttctttgaggtcttcgttggaaacgggtttttttcatgtaaggctagacagaagaattcccagtaacttcccttgtgttgtgtgtgttcaactcacagagttgaactttcatttacacagagcagatttgaaacactctttttgtggaatttgcaagtggagatttcaagcgctttgaggccaaaggcagaaaaggaaatatcttcgtataaaaactagacagaatcattctcagaaactcctttgtgatgtgtgcgttcaactctcagagtttaacttttcttttcattcagcggtttggaaacactctgtttgtaaagtctgcacgtggatattttgaccacttagaggccttcgttggaaacgggtttttttcatgtaaggctagacagaagaattctcagtaactttccttgtgttgtgtgtattcaactcacagagttgaacgatcctttacacagagcagacttgtaacactctttttgtggaatttgcaagtggagatttcagccgctttgaagtcaaaggtagaaaaggaaatatctccctataaaaactagacagaatgattctcagaaacttcttggtgatgtgtgcgttcaactcacagagtttaacctttcttttcatagagcagttaggaaacactctgtttgtaaactctgcaagtggatattcagacctccttgaggccttcgttggaaacgggatttcttcatactgtgctagacagaagaattctcagtaacttccttgtgttgtgtgtattcaactcacagagttgaatgatcctttacacagagcagacttgaaacactctttttgtggaatttgcaagtggagatttcagccgcgttgaggtcaatggtagaagaggaaatatcttcgtataaaaactagacagaatgattctcagaaactcctttgtgatgtgtgcgttcaactcacagagtttaacttttcttttcatagagcagttaggaaacattctgtttgtaaagtctgcaagtggatattcagacctctttgaggccttctttggaaacgggatttcttcatattatgctagacagaagaattctcagtaacttccttgtgttgtgtgtattcaactgacagagttgaactttcatttagagagagcagatttgaaacactgtttttgtggaatttgcaagtggagatttcaagggctttggggccaagggcagaaaaggaaatatcttcgtataaaaactagacagaatcattctcagaaactgatgcgtgatgtgtgcgttcaactctcagagtttaacttttcttttcattcagcggtttggaaacactctgtctgtaaagtctgcacgtggatattttgaccacttagaggccttcgttggaaacgggtttttttcatgtaaggctagacagaagaattcccagtaacttccttgtgttgtgtacattcaactcacagagttgaactttcccttagacagagcagacttgtaacactctttttgtggaatttgcaagtggagatttcagccgctttgaagtcaaaggtagaaaaggaaatatcttcctataaaaactagacagaatgattctcagaaactcctttgtgatgtgtgcgttcaactcacagagtttaacctttcttttcatagagcagttaggaaacactctgtttgtaaagtctgcaaggggataatcagacctctttgaggccttcgttggaaacgggatttcttcgtattctgctagacagaagaattctcagtaacttcctcgtgttgtgtgtattcaactcacagacttgaacgatcctttacacagagcagacttgaaacactctttttgtggaatttgcaaatggagatttcagccgctttaagatcaatggttgaaaaggaaatatcttcatataaaaattagacagaatgattctcagaaactcctttgtgatgtgtgtgttcaactcacagagtttcacctttcttttcatagagcagttaggaaacactctgtttgtaaagtctgcaagtggacattcagacctccttgaggccttcgttggaaacgggatttcttcatattctgctagacagaagaattctcaataacttccttgtgttgtgtgtattcaactcacagagttgaacgatcctttacacagagcagacttgaaacactctttttgtggaatttgcaagtggagatttcagccgctttgagttcaatggtagaataggaaatatcttcctatagaaactagacagaatgattctcagaaacttctttgtgatgtgtgcgttcaactcacagagttaaaactttcttttcatagagcagttaggaaacactctgtttgtaaagactgcacgtggatattcagacctctttgaggccttcgttggaaacgggtttttttcctgtaaggctagacagaagaattctcagtaacttccttgtgttgtgtgtattcaactgacagagttgaactttcatttagagagagcagatttgaaacactgtttttgtggaatttgcacttggagatttcatgcgctttggggccaatggcagaaaaggaaatatcttcgtataaaaactagacagaatcattctcagaaactgctgcgtgatgtgtgcgttcaactctcagagtttaacttttcttttcattcagcggtttggaaacactctgtttgtaaagtctgcacgtggatattttgaccacttagaggccttcgttggaaacgggtttttttcatgtaagggtagacagaagaattcccagtaacttccttttgttgtgtgcattcaactcacagagatgaacgttcgcttagacagagcagatttgaaacactctatttgtgcaatttgcaagtgtagatttcaagcgctttaaggtcaatggcagaaaaggaaatatcttcgtttcaaaactagacagaatcattcccacaaactgcgttgtgatgtgttcgttcaactcacagggtttaacctttctgttcatagagcagttaggaaacactctgtttgtaaagtctgtaagtggatattctgacatcttgtggccttcgttggaaacgggatttcttcatattctgctagacagaagaattctcagtaacttccttgtgttgtgtgtattcaactcacagagttcaatgatcatttacacagagcagacttgaaacactctttttgtggaatttgcaaggggagatttcagccgctttgaggtcaatggtagaaaaggaaatatcttcgtataaaaactagacagaatgattctcagaaaatcttttgtgatgtgtgcgttcaactcacagagtttaacttttcttcttatagagcagttaggaaacactctgtttgtaaagtctgcaagtggatattcagacctctttgaggccttcgttggaaacgggatttcttcatattatgctagacagaataattctcagtaacttccttgtgttgtgtgtattcaactcacagagttgaaggatcctttacagagagcaggcttgaaacactctttttgtcgaatttgcaagtggagatttctgccgctttgaggtcaatggtagaataggaaatatcttcttatagaaactagacagaatcattctcagaaactgctctgcgatgtgtgcgttcaactctcagagtttaacttttcttttcattcagcagtttggaaacactctgtttgtaaagtctgcacgtggatattttgaccacttagaggccttcgttgcaaacgtgtttttttcctgtaaggctagacagaagaattcccagtaacttccttgtgttgtgtacattcaactcacagagttgaacgttcccttagacagagcagatttgaaacactctttttgtgcaattggcaagtggagatttcaagcgctttaaggtcaaaggcagaaaaggaaatatcttcgtttcaaaactagacagaatgattctcagaaactcctttgtgatgtgtgcgttcaactcacacagtttaacctttcttttcatagagcagttaggaaacactgtttgtaaagtctgcaagtggatattcagacctccttgaggccttcgttggaaacgggatttcttcatattctgctagacagaagaattctcagtaacttccttgtgttctgtgtattcaactcacagagttgaacgatcctttacacagagcagacttgaaacagtctttttgtggaatttgcaagtggagacttcagccgctttgaggtcaatggtagaataggtaatatcttcctatagaaactagacagaatgattctcagaaactcctttgtgatgtgtgcgttcaactcacagagtttaacttttcttttcatagagcagttaggaaacactctgtttgtaaagtctgcaagtggatattcagacctctttgaggccttcgttggaaacgggatttcttcatattctgctagacagaataattctcagtaacttccttgtgttgtgtgtattcaactcacagagttgaacgatcctttacacagagcagacttgaaacattctttttgtggaatttgcaagtggagatttctgccgctttgaggtcaatggtagaataggaaatatcttcctatagaaactagacagaatgattctcagaaactcctttgtgatgtgtgcgttcaactcacagagtttaacctttcttttcattcaccagtttgggaaacactctgtttgtaaagtctgcacgtggatattttgaccacttagaggccttcgttggaaacgggtttttttcctgtaaggctagacagaagaattcccagtaacttccttgtgttgtgtgcattcaactcacagagttgaacgttcccttagacagagcagatttgaaacactctatttgtgtaatttgcaagtgtagatttcaagcgctttaaggtcaacggcagaaaaggatatatcttcgtttcaaaactagacagaatcattcccacaaactcgttgtgatgtgttcgttcaactcacagagtttaacctttctgttcatagagcagttaggaaacactctgtttgtaaagtctgcaagtggatattcagacctccttgaggccttcgttggaaacgggatttcttcatattctgctagacagaagaattctcagaaacttccttgtgttgtgtgtattcaactcacagatgtgaacgatcgtttacacagagcagacttgagacactctttttgtggaatttgtaagtggagatttcagccgctttgaggtcaatggtagaaaaggaaatatcttcatataaaaactagacagaacgattctcagaaactcctttgtgatgtgtgcgttcaactcacagagtttaacctttctgttcatagagcagttaggaaacactctgtttgtaaagtctgcaagtggatattcagacctccttgaggccttcgttggaaacgggatttcttcatattctgctagacagaagaattcccactaacttccttgtgttgtgtgtgttcaactcacagagttgaactttcatttacacagagcagatttgaaacactcattttgtggaatttgcaagtggagatttcaagcgctttgaggccaaaggcagaaaaggaaatatcttcgtataaaaactagacagaatcattctcagaaactgctctgcgatgtgtgcgttcaactctcagagtttaacttttcttttcattcagcagtttggaaacactctgtttgtgaagtctgcacgtggatattttgaccacttagaggccttcgttggaaacgggtttttttcctgtaacgctagacagaagaattcccagtaacttccttgtgttgtgtgcattcaactcacagagttgaacgttcccttagacagagcagatttgaaacactctatttgtccaatttgcaagtgtagatttcaagcgctttaaggtcaacggcagaaaaggaaatatcttcgtttcaaaactagacagaatgattctcagaaacttcattgtgatgtgtgtgtgcaactcacagagtttaacctttcttttcatagagcagttgggaaacagtctgtttgtaaattctgtaagtggatattctgacatcttgtggccttcgttggaaacgggatttcttcatattctgctagacagaagaattctcagtaacctccttgtgttgtgtgtattcaactcacagagttgaacgatcctttacacagagcagacttgaaacactcttttcgtggaatttgcaagtggagatttcagccgctttgagatcaatggtagaaaaggaaatatcttcgtataaaaactagacagaatgattctcataaactcatttgtgatgggtgcgttcaactcacaaagtttaacttttcttttcatagagcagttaggaaacactctgtttgtaaagtctgcaagtggatattcagacctctttgaggccttcgttggaaacgggatttcttcatattatgctagacagaataattctcagtaacttccttgtgttgtgtgtattcaactcacagagttgaacgatcctttacacagagcagacttgaaacattctttttgtggaatttgcaactggagatttcagccgctttgaggtcaatggtagaataggaaatatcttcctacagaaactagacagaatcattctcagaaactgctgcgtgatgtgtgcgttcaactctcagagtttaacttttcttttcattcagcggattggaaacactctgtttgtaaagtctgcacgtggatattttgaccacttagaggccttcgttggaaacgggtttttttcatgtaaggctagacagaagcattcccagtaacttccttgtgttgtgtgcattcaactcacagagatgaacgttcccttagacagagcagatttgaaacactctatttgtgcaatttgcaagtgtagatttcaagcgctttaaggtcaacggcagaaaaggaaatatcttcgtttcaaaactagacagaatcattcccacaaactgcgttgtgatgtgttcgttcaactcacagagtttaacctttctgttcatagagcagttaggaaacactctgtttgtaaagtctgtaagtggatattcggacatcttgtggccttcgttggaaacgggatttcttcatattctgctagacagaagaattctcagtaacttccttgtgttgtgtgtattcaactcacagagttgaacgatcctttacacagagcagacttgaaacattctttttgtggaatttgcaagtggagatttcagccgctttgaggtcaatagtagaaaaggaaatatcttcgtagaaaaactaggcagaatgattctcagaaactcctttgtgatgtgtgcgttcaactcacagagtttaacctttcttttcatagagcagttaggaaacactctgtttgtaaagtctggaagtggatattcagacctccttgaggccttcgttggaaacgggatttcttcatattatgctagacagaagaattctcagtaacttccttgtgttgtgtgtattcaactcacagagttgaactttcatttagagagagcagatttgaaacactgtttttgtggaatttgcaagtggagatttcaagcgctttggggccaaaggcagaaaaggaaatatcttcgtataaaaactagacagaatcattctcagaaactgctgcgtgatgtgtgcgttcaactctcagagtttaacttttcttttcattcagcggtttggaaacactctctttgtaaagtctgcacgtggaaattttgaccacttagaggccttcgttggaaacgggtttttttcatgtaaggctagacagaagaattcccagtaacttccttgtgttgtgtacattcaactcacagagttgaacgttcccttagaccgagcagatttgaaacactctttttgtgcaattggcaagtggagatttcaaccgctttaaggtcaatggcagaaaaggaaatatcttcgtttcaaaactagacagaatcattcccacaaactgcgttgtgatgtgttcgttcatctcacagagtttaacctatcttttcatagagcagttaggaaacactctgtttgtaaattctgtaagtggatattctgacatcttgtggccttcgttggaaacgggatttcttcatattctgctagacagaggaattctcagtaacttccttgtgttgtgtgtattcaactcacagagttgaacgatcctttaaacagagcagacttgaaacactctttttgtggaatttgcaagtggagatttcagccgctttgagttcaatggtagaataggaaatatcttcctatagaaactacacagaatgattctcagaaaatcctgtgtgatgtgtgcgttcaactcacagagtttaacttttcttttcatagagcagttaggaaacactctgtttgtaaagtctgcaagtggatattcagacgtctttgaggccttcgttggaaacgggatttcttcatattctgccagacagaataattctcagtaacttccttgtgttgtgtgtattcaactcacagagttgaaggatcctttacagcgagcaggcttgaaacactctttttgtcgaatttgcaagtggagatttcagccgctttgaggtcaatggtagaataggaaatatcttcttatagaaactagacaaaatcattctcagaaactgctcggtgatgtgtgcgttcaactctcagagtttaacttttcttttcattcagcagtttggaaacactatgtttgtaaagtctgcacgtggatattttgacctctgagaggccttcgttggaaacgggtttttttcatgtaaggctagacagaagaattctcagtaacttccttgtgttgtgtgtattcaactcacagagttgaacgatcctttacacagagcagacttgtaacactctttttgtggaatgtgcaagtggagatttcagccgctttgaagtcaaaggtagaaaaggaaatatcttcctataaaaactagacagaatgattctcagaaactcctttgtgatgtgtgtgttcaactcacagagtttaacctttcttttcatagagcagttagtaaacactctgtttataaagtctgcaagtggatattcagaccccttgaggccttcgttggaaacgggatttcttcacattgtgctagacagagaattctcagtaacttccttgtgttgtgtgtattcaactcacagagttgaacgatcctttacacagagcagacttgaaacactctttttgtggaatttgcaagtggagatttcagccgctttgaggtcaatagtagaaaaggaaatatcttcgtagaaaaactaggcagaatgattctcagaaactcctttgtgatgtttgtgttcaactcacagagtttaacctttcttttcatagagcagttagtaaacactctgtttataaagtctgcaagtggatattcagtcccctttgaggccttcgttggaaacgggatttcttcatattatgctagacagaagaattctcagtaacttccttgtgttgtgtgtattcaactcacagagttgaactttcatttagagagagcagatttgaaacactgtttctgtggaatttccaagtggagatttcaagcgctttggggccaaaggcagaaaaggaaatatcttcgtataaaaactagacagaatcattctcagaaactgctgcgtgatgtgtacgtttaactctcagagtttaacttttcttttcattcagcggtttggaaacactctgtttgtaaagtctgcacgtggatattttgaccacttagaggccttcgttggaaacgggtttttttcatctaaggttagacagaagaattcccagtaacttccttgtgttgtgtacattcaactcacagagttgaacgttcccttagacagagcagatttgaaacactctttttgtgcaattggcaaatggagatttcaagcgctttaagttcaatggcagaaaaggaaatatcttcgtttcaaaactagacagaatcattcccacaaactgccttgtgatgtgttcgttcaactcacagagtttaacctttctgttcatagagcagttaggaaacactctgtaacgtctgtaagtggatattctgacatcttgtggccttcgttggaaacgggatttcttcatattctgctagacagaagaattctcagaatcttccttgtgttgtgtgtattcaactcacacagttgaacgatggtttacacagagcagatatgaaacactctttttgtggaatttgcaagtggagatttcagccgctttgaggtcaatggtagaaaaggaaatatattcgtataaaaactagacagaatgattctcagaaacttctttgtgatgtgtgcgttcaactcacagagtttaacctttcttttcatagagcagttaggaaacactctgtttgtaaactctgcaagtggatattcagacctctgtgaggccttcgttggaaacgggatttcttcatactgtgctagacagaagaattcccagtaacttccttgtgttgtgtgtgttcaactcacagagttgaacttccatttacacagagcagatttgaaacactctttttgtggaatttgcaagtggagatttcaagcgctttgaggccaaaggcagaaaaggaaatatcttcatttcaaaactagacagaatcattctcagaaactgctgcgtgatgtgtgcgttcaactctcagagtttaactttttttttcattcagcggtttggaaacactctgtttgtaaagtctgcacgtggatattttgaccacttagaggccttcgttggaaacgggtttttttcatgtaaggctagacagaagaattcccagtaacttcccttgtgttgtgtgcattcaactcacagagttgaacgttcacttagacagagcagatttgaaacactctatttgtgcaatttgcaagtgtagatttcaagcgctttaaggtcaatggcagaaaaggaaatttcttcgtttcaaaactagacagaatcattcccacaaactgcgttgtgatgtgttcgttcaactcacagagtttaacctttctgttcatagagcagttaggaaacactctgtttgtaaagtctgtaagtgaatattctgacatcttgtggccttcgttggaaacgggatttcttcatattctgctagacagaagaattctcagtaacttccttgtgttgtgtgtattcaactcacagaagttgaacgatcctttacacagagcagacttgaaacactctttttgtggaatttgcaagtggagatttcagccgctttgaggtcaatggtagaaaaggaaatatcttcgtataaagactagacagagtgattctcagaaactcctttgtgatgtgtgcgttcaactcacagagtttaacctttcttttcatagagcagttaggaaacactctgtttgtaaagtctgcaagtggatattcagacctccttgaggtcttcgttggaaacgggatttcttcatattatgctagacagaagaattctcagtaacttccttggtgttgtgtgtattcaaatgacagagttgaactttcatttagagagagcagatttgaaacactgtttttgtggaatttgcaagtggagatttcaagcgctttggggccaaaggcagaaaaggaaatatcttcgtataaaaactagacagaatcattctcagaaactgctctgcgatgtgtgcgttcaactctcagagtttaacttttcttttcattcagcagtttggaaacactctgtttgtaaagtctgcacgtggatattttgaccacttagaggccttcgttggaaacgggttttttttctgtaaggctagacagaagaattcccagtaacttccttgtgttgtgtacattcaactcacagagttgaacgttccgttagacagagcagatttgaaacactctttttgtgcaattggcaaatggagatttcaagcgctttaagttcaatggcagaaaaggaaatatcttcgtttcaaaactagacagaatcattcccacaaactgcgttgtgatgtgttcgttcaacccacagagtttaacctttcttttcatagagcagttaggaaacactctgtttgtaaagtatgaaagtggatattctgacatcttgtggccttcgttggaaacgggatttcttcatattctgctagacagaagaattctcagtaacttccttgtgttgtgtgtattcaactcacagagttgaacgatcctttacacagagcagacttgaaacattctttttatggaatttgcaagtggagatttcagccgctttgaggtcaatggtagaataggaaatatcttcctatacaaactagacagaatgattctcagaaactcctttctgatgtgtgcgttcaactcacagagtttaacatttcttttcatagagcagttaggaaacactctgtttgtaaagtctgcaagtggatattcagacctctttgaggccttcgttggaaacgggatttcttcatattctgctagacagaagaattcccactaacttccttgtgttgtgtgtgttcaactcacagagttgaactttcatttacacagagcagatttgaaacactctttttgtggaatttgaaagtggagatttcaagcgctttgaggccaaaggcagaaaaggaaatatcttcgtttcaaaactagacagaatcattctcagaaactgctctgcgatgtgtgcgttcaactctcagagtttaacttttcttttcattcagcagtttggaaacactctgtttgtaaagtctgcacgtggataatttgaccacttagaggccttcgttggaaacgagtttttttcatgtaaggctagacagaagaattcccagtaacttccttgtgttgtgtgcattcaactcacagagttgaacgttcccttagacagagcagatttgaaacactctatttgtccaatttgcaagtgtagatttcaagcgctttaaggtcaacggcagaaaaggaaatatcttcgtttcaaaactagacagaatcattcccacaaactgcgttgtgatgtgttcgttcaactcacagagtttaacctttcttttcatagagcagttaggaaacagtctgtttgtcaattctgtaagtggatattctgacatcttgtggccttcgttggaaacgggatttcttcatattctcctagacagaagaattgtcagtaacttccttgtgttgtgtgtattcaactcacagagttgaacgatcctttacacagagcagacgtaaagcactctttttgtggaattggcaagtggagatttcagccgctttgaggtcaatggtagaaaaggaaatatcttcgtataaaaactagacagaatgattctcagaaactcctttgtgatgtgtgcgttcaactcacagagtttaacctttcttttcatagagcagttaggaaacactctgtttgtaaagtctgcaagtggatattcagacatctttcaggcgttcattggaaacgggatttcttcatattatgctagacagaagaattcccagtaacttccttgtgttgtgtgtgttcaactcacagagttgaactttcatttacacagagcagatttgaaacactctttttgtggaatttacaggtggagatttcaagcgctttgaggccaaaggcagaaaaggaaatatcttcgtataaaaactagacagaatcattctcagaaactgctctgcgatgtgtgcgttcaactctcagagtttaacttttcttttcattcagcagtttggaaacactctgtttgtaacgtctgcacgtggataatttgaccacttagaggccttcgttggaaacgggtttttttcatgtaaggctagacagaagaattcccaggaacttccttgtgttgtgtacattcaactcacagagttgaacgttcccttagacagagcagatttgaaacagtctttttgtgcaattggcaagtggtgatttcagccgctttgaggtcaatggtagaaaaggaaatatcttcgtataaaaactagacagaatgattctcataaactcctttgtgatgtatgcgttcaactcacagagtttaacctttcttttcatagagcagttaggaaacactctgtttgtaaagtctgcaagtggatattcagacctccttgaggccttcgttggaaacgggatttcttcatattctgctagaaagaagaattctcagtaacttccttgtgttgtgtgtattcaactcacagagttgaacgatcctttacacagagcagacttgaaacactctttatgtggaatttgcttgtggagatttcagctgctttgaggtcaatggtagaaaaggaaatatcttcgtataaagagtagacagaacgattctcagaaactcctttgtgatgtgtgcgttcaactcacagagtttaacttttcttttcatagagccgttaggaaacactctgtttgtaaagtctgcaagtggatattcagacctctttgaggccttcgttggaaacgggatttcttcctattctgctagacagaagaattctcagtaacttccttgtgttgtgtgtattcaactcacagagttgaacgatcctttacacagagcagacttgaaacactctttttgtggaatttgcaagtggagatttcagccgctttgaggtcaatggtagaaaaggaaatatcttcgtataaaagactagacagaatcattctcagaaactgctctgcgatgtgtgcgttcaactctcagagtttaacttttcttttcattcagcagtttggaaacactctgtttgtaaagtctgcacgtggatattttgaccccttagaggccttcgttggaaacgggtttttttcctgtaaggctagacagaagaattcccaggaacttccttgtgttgtgtgcattcaactcacaaagttgaacgttcccttagacagagcagatttgaaacactctatttgtgcaatttgcaagtgtagttttcaagctctttaaggtcaacggcagaaaaggaaatatcttcgtttcagaactagacagaatcattcccacaaactgcgttgtgatgtgttcgttcaactcacagagtttaacctttcttttcatagagcagttaggaaacactctgttgtaaattctgtaagtggatattctgacatcttggggccttcgttggaaacgggatttcttcatattctgctagacagaagaattctcagtaacttccttgtgttgtgtgtattcaactcacagagttgaacgatcctttacacagagcaaacttgaaacactctttttgtggaatttgcaagtggagatttcagccgctttgaggtcaatggtagaaaaggaaatatcttcgtataaagactagacagaatgattctcagaaactcctttgtgatgtgtgcgttcaactcacagagtttaacctttcttttcatagagcagttaggaaacactctgtttgtaaagtctgcaagtggatattcagacctctttgaggccttcgttggaaacgggttttttttcatataaggctagacagaagaattcccagtaacttccttgtgttgtgtgtgttcaactcacagagttgaactttcatttacacagagcagatttgaaacactctttttgtggaatttgcaagtggagatttcaagcggtttgaggccaaaggcagaaaaggaaatatcttcgtttgaaaactagacagaatgattctcataaactcctttgtgatgtgtgcgttcaactcacagagtttaacctttcttttcatagagcagttaggaaacactctgtttgtaaagtctgcaagtggatattcagacctgtttgaggccttcgttggaaacgggatttcttcatattctgctagacagaagaattctcagtaacttccttgtgttgtgtgtattcaactcacagagttgaacgatcctttacacagagcagacttgaaacactctttttgtggaatttgcaagtgtagatttcaagcgctttaaggtcaatggcagaaaaggaaatatcatcgtttcaaaactagacagaatcattcccacaaactgcgttgtgatgtgttcgttcaactcacagagtttaaactttctgttcatagagcagttaggaaacactgtgtttgtaaagtctgcaagtggatattcagacctctttgaggccatcgttggaaacgggatttcttcatattctgctagacagaagaattctcagaaacttccttgtgttgtgtgttttcaactcacagagttcaacgatcctttacacagagcagacttgaaacactctttttgtggaatttgcaagtggagatttcagcctctttgagatcaatggtagaataggaaatatcttcctatagaaactagacagaatgattctcagaaactcctttgtgatgtgtgcgttcaactcacacagtttaacctttcttttcatagagcagttaggaaacactctgtttgtaaagtctgcaagtggatattcagacctccttgaggcattcgttggaaacgggatttcttcatattatgctagacagaagaattctcagtaacttccttgtgttgtgtgtattcaaatcacagagttgaacgatcctttacacagagcagacttgaaacactctttttgtggaatttgcaagtggagatttcagccgctttgaggtcaatgttagaataggaaatatcttcctatagaaactagacagaatgattctcagaaaatcttttgtgatgtgtgcgttcaactcacaggagtttaacttttcttctcatagagcagttaggaaacactctgtttgtaaagtctgccagtggatattcagacctctttgaggtcttcgttggaaacgggatttcttcatattatgctagacagaagaattcccagtaacttccttgtgttgtgtacattcaactcacagagttgaacgttcccttagacagagcagatttgaaacactctttttgtgcaattggcaaatggagatttcaagcgctttaagttcaatggcagaaaaggaaatatcttcgtttcaaaactagacagaatgattctcagaaacttctttgtgatgtgtgcgttcaactcacagagtttaacctttcttttcatagagcagttaggaaacactctgtttgtaaactctgcaagtggatattcagacctctttgtggccttcgttggaaacgggatttcttcatactatgctagacagaagaattctcagtaacttccttgtgttgtgtgtattcaactcacagagttgaacgatcctttacacagagcagacttgtaacactctttttgtggaatttgcaagtggagatttcagccgctttgaagtcaaaggtagaaaaggaaatatcttcgtataaaaactagacagaatgattctcagaaacttccttgtgatgtgtgcgttcaactcacagagtttaacctttcttttcatagagcagttaggaaacactctgtttgtaaactctgcaagtggatattcagacctctttgaggccttcgttggaaacgggatttcttcatactatgctagacagaagaattctcagtaacttaccttgtgttgtgtgtattcaactgacagagttgaactttcatttacacagagcagatttgaaacactctttttgtggaatttgcaaatggagatttcaagcgctttgaggccaaaggcagaaaaggaaatatcttcgtataaaaactagacagaatcattctcagaaactgctctgcgatgtgtgcgttcaactctcagagtttaacttttcttttccttcagcagtttggaaacactctgtttgtaaagtctgcacgtggataatttgaccacttagaggccttcgttggaaacgggtttttttcatgtaaggtctagacagaagaattcccagtaacttccttgtgttgtgtgcattcaactcacagagttgaacgttcccttagacagagcagatttgaaacactctatttgtgcaattggcaagtgtagatttcaagcgctttaaggtcaatggcagaaaaggaaatatcttcgtttcaaaactagacagaatgattctaagaaaatcttttgtgatgtgtgcgttcaactcacagagtttaacttttcttctcatagagcagttaggaaacactctgtttgtaaagtctgcaagtggatattcagacctctttgaggccttcgttggaaacgggatttcttcatattatgctagacagaataattctcagtaacttccttgtgttgtgtgtattcaactcacagagttgaaggatcctttacagagagcaggcttgaaagactctttttgtcgaatttgcaagtggagatttcagccgctttgaggtcaatggtagaataggaaatatcttcttatacaaactagacagaatgattctgagaaactcctttgtgatgtgtgcgttcatctcacagagtttaacctttcttttcatagagcagttaggaaacactctgtttgtaaagtctgcaagtggatattcagacctccttgaggccttctttggaaacgggatttcttcatattatgctagacacaagtattcccagtaacttccttgtgttgtgtgtgttcaactcacacagttgaactttgatttacacagagcagatttgaaacactctttttgtggaatttgcaagtggagatttcaagcgctttgaggccaaaggcagaaaaggaaatatcttcgtataaaaactagacagaatcattctcagaaactgctctgcgatgtgtgcgttcaactcttagagtttaacttttcttttcattcagcagtttggaaacactctgtttgtaaagtctgcacgtggatattttgaccacttagaggccttcgttggaaacgggtttttttcctgtaaggctagacagaagatttcccagtaaattccttgtgttgtgtacattcaactcacagagttgaacgttcccttagacagagcagatttgaaacactctttttgtgcaattggcaagtggagatttcaagcgctttaaggtcaatggcagaaaaggaaatatcttcgtttcaaaactagacagaatcattcccacaaactgcgttgtgatgtattcgttcaactcacagagtttaacctttcttttcatagagcagttaggaaacagtctgtttgtaaattctgtaagtggatattctgacatcttgtggccttcgttggaaacgggatttcttcacattctgctagacagaagaattctcagtaacttccttgtgttgtgtgtattcaactcacagaattgaatgatcctttacacagaacagtcttgaaacactctttttgtggaatttgcaagtggagatttcagccgctttgaggtcaatggtagaataggaaatatcttcctatagaaactagacagaatgattctcagaaactcctttgtgatgtgtgcgttcaactcacagagttcaacctttcttttcatagagcagttaggaaacactctgtttgtaaagtctgcaagtggatattcagacatctttgaggctttcgttggaaacgggatttcttcatattctgctagacagaagaattcccagtaacttccttgtgttgtgtgtgtccaactcacagagttgaactttcatttacacagagcagatttgaaacactctttttgtggaacttgcaagtggagatttcaagcgctttgaggccaaaggcagaaaaggaaatatcttcatttcaaaactagacagaatcattctcagaaactgctctgcgatgtgtgcgttcaactctcagagtttaacttttcttttcattcagcagtttggaaacactctggttgtaaagtctgcacgtggatattttgaccacttagaggccttcgttggaaacgggtttttttcctgtaaggctagacagaagaattcccagtaacttccttgtgttgtgtgcattcaactcacagtgttgaacgttcccttagacagagcagatttgaaacactctatttgtgcaatttgcaagtgtagatttcaagcgctttaaggtcaatggcagaaaaggaaatatcttcgtttcaaaactagacagaatcattcccacaaactgcgttgtgatgtgttcgttcaactcacagagtttaacctttccgttcatagagcagttaggaaacacactgtttgtaaagtctgtaagtggatattctgacatcttgtggccttcgttggaaacgggatttcttcatattctgctagacagaagaattctcagtaacttccttgtgttgtgtgtattcaactcacagagttgaacgatcctttacacagagcagacttgtaacactctttttgtggaattcgcaagtggagatttcagccgctttgaagtcaaaggtagaaaaggaaatatcttcctataaaaactagacagaatgtttctcagaaacttctttgtgatgtgtgcgttcaactcacagagtttaacctttcttttcatagagcagttaggaaacactctgtttgtaaagtctgcaagtggatattcagacctctttgaggccttcgttggaaacgggatttcttcatactgtgctagacagaagaattctcagtaacttccttgtgttgtgtgtattcaactcacagagttgaacgatcctttacacagagcggactggaaacactctttttgtggaatttgcaagcggagatttcaggtgcgttgaggtcaatggtagaaaaggaaatatcttcgtataaaaactagacagaatcattctcagaaactgctctgcgatgtgtgcgttcaactctcagagtttaacttttcttttcattcagcagttcggaaacactctgtttgtaaagtctgcacgtggatattttgaccacttagatgccttctttggaaacgggtttttttcttgtaaggctagacagaagaattcccagtaacttccttgtgttgtgtgcattcaactcacagacttgaacgttcccttagacagagcagatttgaaacactctatttgtgcaatttgcaagtgtagatttcaagcgctttaaggtcaatggcagaaaaggaaatatcttcgtttcaaaactagacagaatcattcccacaaacagcgttgtgatgtgttcgctcaactcacagagtttaacctttcttttcatagagcagttaggaaacagtctgtttgtcaattctgtaagtggatattctgacatcttgtggcattcgttggaaacgggatttcttcatattctgctagacagaagaattctcagaatcttccttgtgttgtgtgtattcaactcacagagttgaacgatcctttacacagagcagacttgaaacactctttttgtggaatttgcaagtggagatttcagccgctttgaggaccatggtagaaaaggaaatatcttcgtataaaaactagacagaatgattctcagaaactcctttgtgatgtgtgctttcaacgcacagagtttaacctttcttttcatagagcagttaggaaacactctgttggtaaagtctgcaagtggatattcagacctccttgaggccttcgttggaaacgggatttcttcatattatgctagacagaagaattctcagtaactttccttgtgttgtgtgtattcaactgacagagttgaactatcatttagagagagcagatttgaaacactgtttttgtggaatttgcaagtggagatttcaagcgctttggggccaaaggcagaaaaggaaatatcttcgtataaaaactagacagaataattgtcagaaactgctgcgtgatgtgtgcgttcaactctcagagtttaacttttcttttcattcagcggtttggaaacactctgtttgtaaagtctgcacgtggaaattttgaccacttagaggccttcgttagaaacgggtttttttcatgtaaggctagacagaagaattcccagtaacttccttgtgttgtgtgcattcaactcacagagttgaacgttcccttagacagagcagatttgaaacactctatttgtgcaatttgcaagtgtagatttcaagcgctttaaggtcaatggcagaaaaggaaatatcttcgttttaaaactagacagaatgattctcagaaaatcctttgtgatgtgtgcgttcaactcacagagtttaacctttcttttcatagagcagttaggaaacactctgtttgtaaagtctgcaagtggatattcagacctctttgaggccttcgttggaaacgggatttcttcatattctgctagacagaagaattctcagtaacttccttgtgtagtgtatattcaactcacagagttgaacgatcctttacacagagcagacttgaaacactctttttgtggaatttgcaagtggagatttcagccgctttgaggtcaatagtagaaaaggaaatatcttcgtagaaaaactagacagaatgattctcagaaactgctttgtgatgtgtgcgttcaactcacaaagtttaacctttcttttcatagagcagttaggaaacactctgtttgtaaagtctgcaagtggatattcagacctctttgaggccttcgttggaaacgggtttttttcatataaggctagacagaagaattctcagtaacttccttgtgttgtgtgtattcaactgacagagttgaactttcatttagagagagcagatttgtaacactgtatttgtggaatttgcaagtgtagatttcaagcgatttgcggccaaaggcagaaaaggaaatatcttcgtataaaaactagacaggatcattctcagaaactgctctgcgatgtgtgcgttcaactctcagaatttaacttttcttttcattcagcagtttggaaacactctgtttgtaaagtctgcacgtggatattttgaccacttagaggccttcgttggaaacgggtttttttcctgtaaggctagacagaagaattcccagtaacttccttgtgttgtgtacattcaactcacagagttgaacgttcccttagacagagcagatttgaaacactctttttgtgcaattggcaagtggagatttcaagcgctttgaggtcaatggcagaaaaggaaatatcttcgtttcaaaactagacagaatcattcccacaaactgcgttgtgatgtgttcgttcatctcacagagtttaacctttcttttcgtagagcagttaggaaacagtctgtttgtaaattctgtaagtggatattctgacatgcttgtggccttcgttggaaacgggatttgcttcatattctgctagacagaagaattctcagtaacttcgttgtgttgtgtgttttcaactcacagagttaaaggatcatttacacagagtagacttgaaacactctttttgtggaattggcagggtggagatttcagccgctttgaggtcaatggtagaaaaggaaatatcttcgtataaaaactagacagagtgattctcagaaactcctttgtgatgtctgcgttcaactcacagagtttaacctttcttttcatagagcagttaggaaacactctgtttgtaaagtctgcaagtggatattccgacctccttgagggcttcgttggaaacgggatttcttcatattatgctagacagaagaattcccagtaacttccttgtgttgtgtgtgttcaacccacagagttgaactttcatttacacagagcagatttgaaacactctttttgtggaatttgcaagtggagatttcaagcgctttgaagccaaaggcagaaaaggaaatatcttcgtttcaaaactagacagaatcattctcagaaactgctctgcgatgtgtgcattcaactctcagagtttaacttttcttttcattcagcagtttggaaacactctgtttgtaaagtctgcacgtggataatttgaccacttagaggccttcgttggaaacgggtttttttcatgtaaggctagacagaagaattcccagtaacttccttgtgttttgtgcattcaactcacagagttgaacgttcccttagacagagcagatttgaaacactctatttgtgcaatttgcaagtgtagatttcaagcgctttaaggtcaatggcagaaaaggaaatatcttcgtttcaaaactagacagaatcactcccacaaactgcgttgtgatgtgtgcgttcaagtcaaagagtttaacctttcttttcatagagcagttaggaaacactctgtttgtaaagtctgcaagtggatattcagacctccttgaggccttcgttggaaacgggatttcttcatattctgctagacagaatgattctcagaaactcctttgtgatgtgtgcgttcaactcacagagtttaacctttcttttcatagagcagttaggaaacactctgtttgtaaagtctgcacgtggatattcagacctctttgaggccttcgttggaaacgggatttcttcatattctgctagacagaagaattcccagtaacttccttgtgttgtgtgtgttcaactcacagagttgaactttgatttacactgagcagatttgaaacactctttttgtggaatttgcaagtggagatttcaagcgctttgaggccaaaggcagaaaaggaaatatcttcgtataaaaactagacagaatcattctcagaaacagctctgcgatgtgtgcgttcaactctcagagtttaacttttcttttcattcagcagtttggaaacactctgtttgtaaagtctgcacgtggataatttcaccacttagaggtcttcgttggaaacgggattttttcatgtaaggctagacagaagaattcctagtaacttcccttgggttgtgtacattcaactcacagagttgaacgttcccttagacagagcagatttgaaacactctttttgtgcaattggcaagtggtgatttcagccgctttgcggtcaatggtataaaaggaaatatcttcgtattaaaactagacagaatcattcccacaaactgcgttgtgatgtgttcgttcaactcacagagtttaacctttcttttcatagagcagttacgaaacagtctgtttgtaaattctgtaagtggatattctgacatcttgtggccttcgttggaaacgggatttcttcatattctgctagacagaagaattctcagtaacttccttgtgttgtgtgtattcaactcacagagttgaactctggtttacacagagcagatttgaaacactctttttgtggaatttgcaagtggagatttcagccgctttgaggtcaatggtagaaaaggaaatatcttcgtataaaaactagacagaatgattctcagaaactcctttgtgatgtgtgcgttcaactcacagagtttaacctttcttttcgtagagcagttaggaaacactctgtttgtaaactctgcaagtggatatacagacctctttgaggccttcgttggaaacgggatttcttcatactatgctagacagaagaattcccagtaacttccttgtgttgtgtgtgttcaactcacagaattgaactttcatttacacagagcagatttgaaacactctttttgtggaatttgcaagtggagatttcaagcgctttgaggccaaaggcagaaaaggaaatatcttcgtttcaaaactagacagaatcattctcagaaactgctctgcgatgtgtgcgttcaactctcagagtttaacttttcttttctttcagcagtttggaaacactctgtttgtaaagtctgcacgtggataatttgaccacttagaggccttcgttggaaacgggtttttttcatgtaaggctagacagaggaattctcagtaacttccttgtgttgtgtgtattcaactcacagagttgaacgatcctttacacagagcagacttgtaacactctttttgtggaatttgcaagtggagatttcagccgctttgaagtcaaaggtagaaaaggaaatatcttcctataaaaactagacagaatcattcccagaaactgcgttgtgatgtgttcgttcaactcacagagtttaacctttctgttcatagagcagttaggaaacactctgtttgtaaagtctgtaagtggatattctgacatcttgtggccttcgttggaaacgggatttcttcatattctgctagacagaagaattctcagtaacttccttgtgttgtgtgtattcaactcacagagttgaacgatcctttacacagagcaaacttgaaacactctttttgtggaatttgcaagtggagatttcagccgctttgaggtcaatggtagaaaaggaaactatcttcatataaagactagacagaatgattctcagaaactcctttgtgatgtgtgtgttcacctcacagagtttaacctttcttttcatagagcagttagtaaacactctgtttataaagtctgcaagtggatattcagacccctttgaggccttcgttggaaacggtatttcttcatattatgctagacagaggaattcccagtaacttccttgtgttgtgtgtgttcaactcacagagttgaactttcatttacacagagcagatttgaaacactctttttgtggaatttgcaggtggagatttcaagcgctttgaggccaaaggcagaaaaggaaatatcttcgtataaaaactagacagaatcattctcagaaaatgctctgtgatgtgtgcgttgaactctcagagtttaacttttgttttcattcagcagtttggaaatactctgtttgtaaagtctgcacgtggatattttgaccacttagaggccttctttggaaacgggtttttttcatgtaagggtagacagaagaattcccagtaacttccttgtgttgtgtgcattcaactcacagagttgaacgttcccttagacagagcagatttgaaacactctatttgtgcaatttgcaagtgtagaattcaagcgctttaaggtcaatggcagaaaaggaaatatcttcgtttcaaaactagacagaatcattcccacaaactgcgttgtgatgtgttcgttcaactcacagagtttaacctttctgttcatagagcagttaggaaacactctgtttgtaaagtctgtaagtggatattgctgacatacttgtggccttcgttggaaacgggatttcttcatattctgctagacagagagattctcagtaacttccttgtgttgcgtgtattcaactcacagagttcaacgatcctttacacagagcagacttgaaacacactttttgtggaatttgcaagtggagatttcagccgctttgaggtcagtggtagaaaaggaaatatcttcgtataaaaactagacagaatgattctcagaaactcctttgtgatgtgtgcgttcaactcacagagtttaacctttcttttcatagagcagtgaggaaacactctgtttgtaaagtctgcaagtggatattcagacctctttgtggccttcgttggaaacgggatttcttcatattatgctagacagaagaattcccagtaacttccttgtgttgtgtgtgttcaactcacagagttgaactttcatttacacagagcagatttgaaacactctttttgtgcaatttgcaagtggcgatttcaagcgctttgaggccaaaggcagaaaaggaaatatcttcgtataaaaactagacagaatcattctcagaaactactctgtgatgtgtgcgttcaactctcagagtttaacttttcttttcattcagtagtttggaaacactctgtttgtaaatctgcacgtggatattttgacgacttagaggctttcgttggaaacgggtttttttcatgtaaggctagacagaagaattcccagtaacttccttgtgttgtgtgcattcaactcacagagttgaacgttcccttagacagagcagatttgaaacactctatttgtccaatttgcaagtgtagatttcaagcgctttaaggtcaacggcagaaaaggaaatatcttcgtttcaaaactagacagaatcattcccacaaactgcgttgtgatgtgttcgttcaactcacagagtttaacctttctgttcatagagaagttaggaaacactctgtttgtaaagtctgtaagtggatattctgacatcttgtggccttcgttggaaacgggatttcttcatattctgctagacagaagaattctcagtaacttccttgtgttgtgtgtattcaactcacagagttgaacgatcctttacacagagcagacttgtatcactctttttgtggaatttgcaagtggagatttcagccgctttgaagtcaaaggtagaaaaggaaatatcttcctataaaaactagacagaatgattctcagaaactcctttgtgatgtgtgtgttcaactcacagagtttaacctttcttttcatagagcagttagtaaacactctgtttataaagtctgcaagtggatattcagacccctttgaggccttcgttggaaacgggatttctccatattatgctagacagaaggattcccagtaacttccttgtgttgtgtgtgttcaactcacagagttgaactttcttttacaaatagcagatttgaaacactctttttgtggaatttgcaagtggagatttcaagcgctttgaggccaaaggcagaaaaggaaatatcttcgtataaaaactagacagaatgattctcagaaactcctttgtgatgtgtgcgttcaactcacctttcttttcatagagcagttaggaaacactctgtttgtaaagtctgcacgtggatatttggacttctttgaggccttcgttggaaacgggtttttttcatgtaaggctagacagaataattcccagtaacttccttgtgttgggtgcattaaactcacagagttgaacgttcccttagacagagcagatttgaaacactctatttgtgcaatttgcaagtgtagatttcaagcgctttaaggtcaatggcagaaaaggaaatatcttcgtttcaaaactagacagaatcattcccacaaactgcgttgttatgtgttcgttcaactcacagagtttaacctttcttttcatagagcagttaggaaacactctgtttgtaaattctgtaagtggatattctgacaacttgtggccttcgttggaaacgggatttcttcatactatgctagatagaaagaattctcagtaacttccttgtgttgtgtgtattcaactcacagcagttgaacgatcctttacacagagcagacttgaaacactctttttgtggaatttgcaagtggagatttcagccgctttgaggtcaatagtcgaaaaggaaatatcttcgtagaaaaactagacagaatgattctcagaaactcctttgtgatgtgtgcgtttaactcacagaatttaacctttcttttcatagagcagttaggaaacactctgtttgttaaagtctgcaagtggatattcagacctctttgaggccttcgttggaaacgggatttcttcatattctgctagacagaagaattctcagtaacttccttgtgttgtgtgtattcaactgacagagttgaactatcatttagagagagcagatttgaaacactgtttttgtggaatttgcaagtggagatttcaagcgctttggggccaaaggcagaaaaggaaatatcttcgtataaaaactagacataatcattctcagaaactgctctgcgatgtgtgccttcaactctcagagtttaacttttcttttcattcagcagtttggaaacactctgtttgtaaagtctgcacgtggatattttgaccacttagaggccttctttggaatcgggtttttttcctgtaaggctagacagaagaattcccagtaacttccttgtgttgtgtacattcaactcacagagttgaaggttcccttagacagagcagatttgaaacactctttttgtgcaattggcaagtggagatttcaagcgctttaaggtcaatggcagaaaaggaaatatcttcgtttcaaaactagacagaatcattcccacaaactgcgttgtgatgcgtttgttcaactcacagaatttaacctttcttttcatagagcagttaggaaacagtctgtttgtaaattctgtaagtggatattctgacatcttgtggcctcgctggaaacgggattacttcatattctgctagacagaagaattctcaataacttccttgtgttgtgtgtattcaactcacagagttgaacgatcctttacacagagcagatttgaaacactctttttgtggaatttgcaagtggagatttcagccgctttgaggtcaatggtagaaaaggaaatatcttcgtatgaaaactagacagaatgattctcataaactccctttgtgatgtgtgcgttcaactcacagagtttaacctttcttttcatagagcagttaggaaacactctgtttataaagtctgcaagtggatattcagacctccttgaggccttcgttggaaacgggatttcttcatattctgctagacagaagaattctcagtaacttccttgtgttgtgtgtattcaactgacagagttgaactttcatttagacagagcagatttgaaacactctttttgtggaatttgcaaatggagatttcaagcgctttgaggccaaaggcagaaaaggaaatatcttcgtataaaaactagacagaatgattctcagaaactgctctgcgatgtgtgcgttcaactctcagagtgtaacttttcttttcattcagcagtttggaaacactctgtttataaagtctgcacgtggatattttgaccacttagaggccttcgttggaaacgggattttttcatgtaaggctagaccgaagaattcccagtaacttccttgtgttgtgtacattcaactcacagagttgaacgttcccttagacagagcagatttgaaacactctttttgtgcaattggcaagtggagatttcaagcgctttaaggtcaatggcagaaaaggaaatatcttcgtttcaaaactagagagaatgattctcagaaacttcattgtgacgtgtgcgttcaactcacagagtttaacctttcttttcatagagcagttaggaaacagtctgtttgtcaattctgtaagtggatattctgacatcttgtggccttcgttggaaacgggatttcttcatattctgctagacagaagaattcccagtaacttccttgtgtggtgtgtattcaactcacagagttgaacgatgctttacacagagcagacttgaaacactctttttgtggaatttgcaagtggagatttcagccgctttgaggtcaatggtagaataggaaatatcttcctatagaaactagacagagtgattctcagaaactcctttgtgatgtctgcgttcaactcacagagtttaacctttcttttcatagagcagttaggaaacactctgtttgtaaagtctgcaagtggatattcagacctccttgaggccttcgttggaaatgggatttcttcatattatgctagacagaagaattctcagtaacttccttgtgttgtgtgtattcaactcacagagttgaactttcatttagagagagcagatttgaaacactgtttttgtggaatttgcaagtggagatttcaagcgctttgcggccaaaggcagaaaacgaaatatcttcgtataaaaactagacagaatcattctcagaaactgctgcgtgatgtgtgcgctcaactctcagaatttaacttttcttttcattcagcggtttggaaacactctgtttgtaaagtctgcacgtggatattttgaccacttagaggccttcgttggaaacgggtttttttcatgtaaggctagacggaagaatttcccagtaacttccttgtgttgtgtgcattcaactcacagagttgaacgttcccttagacagagcagatttgaaacactctatttgtgcaatttgcaagtgtagatttcaagcgctttaaggtcaatggcagaaaaggaaatatcttcgtttcaaaactagacagaatcattcccacaaactgcgttgtgatgtgttcgttcaactcacagagtttaacctttctgttcatagagcagttaggaaacactctgtttgtaaagtctgtaagtggatattctgacatcttgtggccttcgttggaaacgggatttctttatattctgctagacagaagaattctcagtaacttccttgtgttgtgtgtattcaactcacagagttgaacgatactttacagagagcagacttgacacactctttttgtggaatttgcaattggagatttcagccgctttgaggtcaatggtagaataggaaatatcttcctatagaaactagacagaatgattctcagaaactcctttgtgatgtgtgcgttcaactcacagagtttaacctttcttttcatagagcagttgggaaacactctgtttgtaaagtctgcaagtggatattcagacttctttgaggccttcgttggaagcgggatttcttcatgttctgctagacagaagaattcccagtaacttccttgtgttgtgtgtgttcaactcacagagttgaactttgatttacacagagcagatttgaaacactccttttgtggaatttgcaagtggagatttcaagcgctttgaggccaaaggcagaaaaggaaatatcttcgtataaaaactagacagaatcattctcagaacctgctgcgcgatatgtgcgttcaactctcagagtttaacttttcttttcattcagcggtttggaaacactctgtttgtaaagtctgcacgtggatattttgaccacttagagtccttcgttggaaacgggtttttttcatgtaaggctagacagaagaattcccagtaacttccttgtgttgtgtgcattcaactcacagagttgaacgttcccttagacagagcagatttgaaacagcctatttgtgcaatttgcaagtgtagatttcaagcgctttaaggtcaacggctgaaaaggaaatatcttcctttcaaaactagacagaatcattcccacaaactgcgttgtgatgtgttcgttcaactcacagagtttaacctttctgttcatagagcagttaggaaacactctgtttgtaaagtctgtaagtggatattttgacatcttgtggccttcgttggaaacgggatttcttcatattctgctagacagaagaattctcagaaacttccttgtgttgtgtgtattcaagtcacagagttgaacgatcctttacacagagcagacttgaaacactctttttgtggaatttgcaagtggagatttcagccgctttgaggtcaatgttagaaaaggaaatatcttcgtataaagactagacagaatgattctcagaaaatcttttgtgatgtgtgcgttcaactcacagagtttaacatttcttctcatagagcagttaggaaacactctgtttgtaaagtctgcaagtggatattcagacttctttgaggccttcgttggaaacgggatttcttcatattatgctagacagaagaattctcagtaacttccttgtgttgtgtgtattcaactgacagagttgaactttcatttagagagagcagatttgaaacactgtttttgtggaatttgcaagtggagatttcaagcgctttggggccaaaggcagaaaacgaaatatcttcgtataaaaagtagacagaatcattctcagaaactgctctgcgatgtgtgcgttcaactctccagagtttaacttttcttttcattcagcagtttggaaacactctgtttgtaaagtctgcacgtggatattttgaccatttagaggctttcgttggaaacgggtttttttcttgtaaggctagacagaagaattcccagtaacttccttgtgttgtgtgcattaaactcacatagttgaacgtttccttagacagagctgaattgaaacacgctatttgtgcaatttgcaagtgtagatttcaagcgctttaaggtcaatggcagaaaaggaaatatcttcgtttcaaaactagacagaatcattcccacaaactgcgttgtgatgtgttcgttcaactcacagagtttaaactttcttttcatagagcagttaggaaacagtctgtttgtcaattctgtaagtggatattctgacatcttgtggccttcgttggaaacgggatttcttcatattctgctagacagaagaattctcagtaacttccttgtgttgtgtgtattcaactcacagagttgtacgatcctttacacagagcagacttgaaacactctttttgtggaatttgcaagtggagatttcagccgctttgaggtcaatggtagaaaaggaaatatcttcgtataaagactagacagagtgattctcagaaactcctttgtgatgtctgcgttcaactcacagagtttaacctttcttttcatagagcagttaggaaacactctgtttgtaaagtctgcaggtgcatattcagacctccttgaggccttagttggaaacgggatttcttcatattctgctatacagaagaattctcagtaacttccttgtgttgtgtgtattcaactcacagagttgaactttcatttacacagagcagatttgaaacactctttttgtggaatttgcaaatggagatttcaagcgctttgaggccaaaggcagaaaaggaaatatcttcgtttcaaaagtagacagaatcattctcagaaactgctgcgttatgtgtgcgttcaactctcagagtttaacttttcttttcattcagcggtttggaaacactctgtttgtaaagtctgtaagtggatattttgaccacttagaggccttcgttggaaatggttttttgcatgtaaggctagacagaagtattcccagtaacttccttgtgttgtgtgcattcaactcacagagttgaacgttccctaggacagagcaggtttgaaacactctatttgtgcaatttgcaagtgtagatttcaagcgcattaaggtcaatggcagaaaaggaaatatcttcgtttcaaaactagacagaatcattcccacaaactgcgttgtgatgtgttcggtcaactcacagagtttaacctttcttttcatagagcagttaggaaacagtctgtttgtcaattctgtaagtggatattctgacatcttgtggccttcgttggaaacgggatttcttcatattctgctagacagaagaattctcagtaacttccttgtgttgtgtgtattcaactcacagagttgaacgatcctttacacagagcagacttgtaaaactctttttgtggaatttgcaagtggagatttcagccgctttgaagtcaaaggtagaaaaggaaatatcttcctataaaaactagacagaatgattctcagaaactcctttgtgatgtgtgcgttcaactcacagagtttaacctttcttttcatagagcagataggaaacactctgtttgtaaagtctgcaagtggatattcagacctccttgaggccttcgttggaaacgggatttcttcatattatgctagacagaagaattctcagtaacttccttgtgttgtgtgtattcaactgacagagttgaactttcatttagagagagaagatttgaaacactgtttttgtggaatttgcaagtggagatttcaagcgctttggggccaaaggcagaaaaggaaatatcttcgtataaaaactagacagaatcattctcagaaactgctgcgtgatgtgtgcgttcaactctcagagtttagcttttcttttcattcagcggtttggaaacactctgtttgtaacgtctgcacgtggatattttgaccacttagaggccttcgttggaaacgggttttttgcatgtaaggctagacagaagaattcccagtaacttccttgtgttgtgtgcattcaactcacagagttgaacgttcccttagacagagcagatttgaaacactctatttgtgcaatttgcaagtgtagatttcaagcgcattaaggtcaatggcagaaaaggaaatatcttcgtttcaaaattagacagaatcattcccacaaactgcgttgtgatgtattcgttcaactcacagagtttaacctttctgttcatagagcagttaggaaacactctgtttgtaaagtctgtaagtggatattctgacatcttgtggcccttcgttggaaacgggatttcttcatattctgctagacagaagaattctcagtaacttccttgtgttgtgtgtattcaactcacagagttgaaggatcctttacagagagcaggctagaaaaactctttttgtcgaatttgcaagtggagatttcagccgctttgaggtcaatggtagaataggaaatatcttcttatagaaactagacagaatgattctcagaaactcctttgtgatgtgtgtgttcaactcacagagtttaatctttcttttcatagagcagttagtaaacactctgtttataaagtctgcaagtggatattcagacccctttgaggccttcgttggaaacgggatttcttcatattatgctagacagaagaaatctcagtaacttccttgtgttgtgtgtattcaactgacagagttgaagtttcatttagacagagcagatttgaaacactatttttgtgcaatttgcaagtggagatttcaagcgctttggggccaaaggcagaaaaggaaatatcttcgtataaaaactagacagaatcattatcagaaactgctgcgtgatgtgtgcgttcaactctcagaatttaacttttcttttcattcagcggtttggaaacactctgtttgtaaagtctgcacgtggatattttgaccacttagaggccttcgttggaaacgggtttttttcatgtaaggctagacagaagatttcccagtaacttccttgtgttgtgtacattaaactcacagagttgaacgttcccttagacagagcagatttgaaacactctttttgtgcaattggcaaatggagatttcaagcgctttaaggtcaatggcagaaaaggaaatatcttcgtttcaaaactagacagaatcattcccacaaactgcgttgtgatgtgctcgttcaactcacagagtttaacctttctgttcacagagcagttaggaaacactctgtttgtaaagtctgtaagtggatattctgacatcttgtggccttcgttggaaacgggatttcttcatattctgctagacagaagaattctcagtaacttccttgtgttctgtgtattcaactcacagagttgaacgatcctttacacagagcagacttgaaacactctttttgtggaatttgcaagtggagatttcagccgctttggggtcaatagtagaaaaggaaatatcttcgtagaaaaactagacagaatgattctcagaaactcctttgtgatgtgtgtgttcaactcacagagtttaacctttcttttcatagagcagttagtaaacactctgtttataaagtctgcaagtggatattcagacccctttgaggccttcgttggaaacgggatttattcatattatgctagacagaagaattctcagtaacttccttgtgttgtgtgtattcaactgacagagttgaactttcatttagagagagcagttttgaaacactgtttttgtggaatttgcaagtggagatttcaagcgctttggggccaaaggcagaaaaggaaacatcttcgtatgaaaactagacagaatcattctcagaaagtgctctgcgatgtgtgcgttcaactctcagagtttaactttgcttttcattcagcagtttggaaacactctgtttgtaaagtctgcacgtggataatttgaccacttagaggccttcgttggaaacgggtttttttcatgtaaggctagacagaagaattcccagtaacttccttgtgttgtgtacattcaactcacagagttgaacgttcccttagacagagcagatttgaaacactctttttgtgcaattggcaagtggtgatttcagccgctttgaggtcaatggtagaaaaggaaatatcttcgtataaaaactagacagaatgattctcagaaactcctttgtgatgtgtgcgttcaactcacacagtttaacctttcttttcagagagcagttaggaaacactctgtttgtaaagtctgcaagtggatattcagacctccttgaggccttcgttggaaacgggatttcttcatattatgctagacagaagaattctcattaacttccttgtgttgtgtgtattcaactcacagagttgaacgatcctttacacagagcagacttgtaacactctttttgtggaatttgcaagtggagatttcagccgctttgaagtcaaaggtagaaaaggaaatatcttcctataaaaattagacagaatgattctcagaaactcctttgtgatgtgtgtgttcaactcacagagtttaacctttcttttcatagagcagttaggaaacactctgtttgtaaagtctgcaagtggatattcagacctctttgaggccttcattggaaacgggctttttttcctataaggctagacagaagaattccgagtaacttccttgtgttgtgtgtgttcaactcacagagttgaactttcatttacacagagcagatttgaaacactctttttgtggaatttgcaagtggagatttcaagcgctttgaggccaaaggcagaaaaggaaatatctccgtttcaaaactagacagagaatcattctcagtaaactgctctgcgatgtgtgcgttcaactctcagagtttaacttttcttttcattcagcagtttggaaacactctgtttgtaaagtctgcacgtggatattttgaccacttagaggccttcgttggaaacgggtttttttcctgtaaggctagacagtagaattcccagtaacttccttgtgttgtgtacattcaactcacagagttgaacgttcccttagacagagcagatttgaaacactctttttgtgcaattggcaaatggagatttcaagcgctttaaggtcaatggcagaaaaggaaatgtcttcgtttcaaaactagacagaatcattcccacaaactgcgttgtgatgtgttcgttcaactcacagagtttaacgtttcttttcatagagcagttaggaaacagtctgtttgtcaattctgtaagtggatattctgacatcttgtggccttcgttggaaacgggatttcttcatattctgctagacagaagaattctcagaatcttccttgtgttgtgtgtattcaactcacagagttgaacgatcctttacacagagcagacttgaaacactatttttgtggaatttgcaagtggagatttcagccgctttgaggtccatggtagaaaaggaaatatcttcgtataaaaactagacagaatgattctcagaaactcctttgtgatgtgtgcattcaacttacagagtttaacctttcttttcatagagcagttaggaaacactctgtttgtaaagtctgcaagtggatactcagacctctttgaggccttcgttggaaacgggatttcttaatattatgctagacagaagaattcccagtaacttccttgtgttgtgtgtgttcaactcacagagttgaactttcatttacacaaagcagatttgaaacactctttttgtggaatttgcaagtggagatttcaagcgctttgaggccaaaggcagaaaaggaaatatcttcgtttcaaaactagacagaatgattctcagaaactgctctgcgatgtgtgcgttcaactctcagagtttaacttttcttttcattcagcagtttggaaacactctgtttgtaaagtctgcacgtggatattttgaccatttagaggccttcgttggaaacgggtttttttcttgtaaggctagacagaagaattcccagtaacttccttgtgttgtgtacattcaactcacagagttgaacgttcccttagacagagcagatttgaaacactctttttgtgcaattggcaagtggtgatttcagctgctttgaggtcaatggcagaaaagggaatatcttcgtataaaaactagacagaacgattctcagaatcttccttgtgatgtgtgcgttcaactcacagagtttaacctttcttttcatagagcagttaggaaacactctgtttgtaaactctgcaagtggatattcagacctcattgaggccttctttggaaacgggatttcttcatactatgctagacagaagaattctcagtaacttccttgtgttgtgtgtattcaactcacagagttgaacgatcctttacacagagcagacttgaaacactctttttgtggaatttgcaagtcgagatttcagccgctttgaggtcaatggtagaaaaggaaatatcttcgtataaaaactagacagaatgattctcagaaactgctttgtgatgtgtgcgtttaactcacagagtttaacctttcttttcatagagcagttaggaaacactctgtttgtaaagtctacaagtgtatattcagacctctttgaggccttcgttggaaacgggtttttttcatataaggctagacagaagaattctcagtaacttccttgtgttgagtgtattaaactcacagagttcaatgatcctttacacagagcggacttgaaacactctttttctggaatttgcaagtggagatttcagccgcgttgaggtcaatggtagaaaagggaaatatcttcgtataaaaactagacagaatgattctcagaaactcctttatgatgtgtgcgttcaactcacagagtttaacctttcttttcatagagcagttaggaaacactctgtttgtaaagtctgcaagtggatattttcacctctttgaggccttcgttggaaacgggttttttttcatgtaaggctagacagaagaattctcagtaacttccctgtgttgtgtgttttcaactgacagagttgaactttcatttagagagagcagatttgaaacactgtttttgtggaatttgcaagtggagatttcaagcgttttggagccaaaggcagaaaaggaaatatcttcgtataaaaactagacagaatcattctcagaaactgctgcgtgatgtgtgcgttcaactctcagagtttaacttttcctttcattcagcggtttggaaacactctgtttgtaaagtctgcacgtggatattttgaacacttagaggccttcgttggaaacgggtttttttcatgtaaggctagacagaagaatttccagtaacttccttgtgttgtgtgcattcaactcacagagttgaacgttcccttagacagagcagatttgaaacactctagttgtgcaatttgcaagtgtagatttcaagcgctttaaggtcaatggcagaaaaggaaatatcttcgtttcaaaactagacagaatgattctcagaaaatcttttgtgatgtgtgcgttcaactcacagagtttaacttttcttctcatagagcagttaggaaagactctgtttgtaaagtctgcaagtggatattcagacctctttgaggccttcgttagaaacgggatttcttcatattatgctagacagaataattctcagtaacttccttgtgttgtgtgtattcaactcacagagttgaacgatcctttacagagagcaggcttgaaacactctatttgtcgaatttgcaagtggagatttcagccgctttgaggtcaatggtagaataggaaatatcttcttatagaaactagacagagtgattctcagaaactcctttgtgatgtctgcgttcaactcacagagtttaacctttcttttcatagagcatttaggaaacactctgtttgtaaagtctgcaagaggatattcagacctccttgaggccttcgttggaaacgggatttcttcatattctgctatacagaagaattcccagtaacttccttgtgttgtgtgtgttcaactcacagagtttgaactttcatttacacagagcagatttgaaacactctttttgtggaatttgcaaatggagatttcaagcgctttgaggccaaaggcagaaaaggaaatatcttcgtataaaaactagacagaatcattctcagaaactgctctgcgatgtgtgcgttcaactctcagagtttaacttttcttttcattcagcagtttggaaaccctctgtttgtaaagtctgcacgtggataatttgaccacttagaggccttcgttggaaacgggtttttttcatgtaaggctagacagaagaattcccagtaacttccttgtgttgtgtacattcaactcacagagttgaacgttcccttagacagagcagatttgaaacactctttttgtgcaattggcaagtggagatttcaagcgctttgaggtcaatggcagaaaaggaaatatcttcgtttcaaaactagacagaatcattcccacaaactgcgttgtaatgtgtgcgttcaactcacagagtttaacctttcttttcatagagcagttaggaaacactctgtttgtaaagtctgcaagtggatattcagacctctttgaggccttcgttggaaacgggatttcttcatattctgctagacagaagaattctcagtaacttccttgtgttgtgtgtattcaactcacagagttgaacgatcctttacacagaacagacttgaaacactctttttgtggaatttgcaagtgcagatttcagccgctttgaggtcaatggtagaataggaaatatcttcctatagaaactagacagaatgattctcagaaactcctttgtgatgtgtgcgttcaagtcgcagagtttaacctttcttttcttggagcagttaggaaacactctgtttgtaaagtctgcacgtggatattcagacctctttgaggccttcgttggaaacgggatttcttcatattctgctagacagaagaattcccagtaacttccttgtgttgtgtgtgttcaactcacagagttgaactttcattttcacagagcagatttgaaacactctttttgtggaatttgcaagtggagatttcaagcgctttgaggccaaaggcagaaaaggaaatatcttcgtttcaaaactagacagaatcattctcagaaactgctctgcgatgtgtgcgttcaactctcagagtttaacttttcttttcattcagaagtttggaaacactctgtttgtaaagtctgcacgtggatattttgaccacttagaggccttcgttggaaacgggtttttttcctgtaaggctagacagaagaattcccagtaacttccttgtgttgtgtacattcaaatcacagagttgaacgttcccttagacagagcagacttgtaacactctttttgtggaattttcaagtggagatttcagccactttgaagtcaaaggtagaaaaggaaataacttcctataaaaactagacagaatcattcccacaaactgcgctgtgatgtgttcgttcaactcacagagtttaacctttctgttcatagagcagttaggaaacactctgtttgtaaagtctgtaagtggatattctgacatcttgtggccttcgttggaaacgggatttcttcatattatgctagacagaagaattctcagtaacttccttgtgttgtgtgtattcaactcacagagttgaccgatcctttacacagagcagacttgtaacactctttttgtggaatttgcaagtggagatttcagccgctttgaagtcaaaggtagaaaagggaatatcttcatataaaaactagacagaatgattctcagaaactcctttgtgatgtgtgcgttcaagtcacagagtttaacctttcttttcatagagcagttaggaaacactctgtttgtaaagtctgcaactggagattcagccctctttgaggccttcgttggaaacgggatttcttcatattctgctagacagaagaattcccagtaacttccttgtgttgtgtgtgttcaactcacagagttaaactttcatttacacagagcagatttgaaacactctttttgtggaatttgcaagtggagatgtcaagcgctttgaggccaaaggcagaaaaggaaatatcttcgtttcaaaactagacagaatcattctcagaaactgctctgcgatgtgtgcgttcaactctcagagtttaacttttcttttcattcagcagtttggaaacactctgtttgtaaagtctgcacgtggatattttgaccacttagaggccttcgttggaaacgtgtttttttcctgtaagcctagacagaagaattcccagtaaattcctagtgttgtgtgcattcaactcacagagatgaacgttcccttagacagagcagatttgaaacactctgtgcaatttgcaagtgtagatttcaagcgctttaatgtcaatggcagaaaaggaaatatcttcgcttcaaaactagacagaatcattccaacaaactgcgttgtgatgtgctctttcaactcatagagtttaacctttctgttcatagagcagttaggaaacactctgtttctaaagtctgtaagtggatattctgacatcttgtggccttcgttggaaacgggatttcttcatattctgctacacagaagaattctcagtaacttccttgtgttgtgtgtattcaactcacagagttgaacgatcctttacagagagcatacttgaaacactctttttgtggaatttgcaagtggagatttcagccgctttgaggtcaatggtagaataggaaatatcttcctatagaaacaagacagaatgattctctgaaactcctttgtgatgtgtgcgttcaactcacagagtttaacctttcttttcatagagcagttaggaaacactctgtttgtaaagtctgcaagtggatattcagacctccttgaggccttcgttggaaacgggatttcttcatattatgctagacagaagaattctcagtaacttcccttgtgttgtgtgtattcaactgacagagttgaactttcatttagagagagcagatttgaaacactgtttttgtggaatttgcaagtggagatttcaagcgctttggggccaaaggcagaaaaggaaatatcttcgtataaaaactagacagaatcattctcagaaactgctgcgtgatgtgtgcgttcaactctcagagtttaacttttcttttcattcagcggtttggaaacactctgtttgtaaagtctgcacgtggaaattttgaccacttagaggccttcatggaaacgggtttttttcatgtaaggctagacagaagaattcccagtaacttccttgtgttgtgtgcattcaactcacagagttgaacgttcctttagacagagcagatttgaaacactctatttgtgcaatttgcaagtgtagttttcaagctctttaaggtcaacggcagaaaaggaaatatcttggtttcaaaactagacagaatcattcccacaaactgcgttgtcatgtgttcgttcaactcacagagtttaacctttcttttcatagagcagttaggaaacagtctgtttgcaaattctgtaagtggatattctgacatcttgtggccttcgttggaaacggcatttcttcatattctgctagacagaagaattctcagaatcttgcttgtgttgtgtgtattcaactcacagagttgaacgatcctttacacagagcagacttgaaacactctttttgtggaatttgcaagtggagatttcagccgctttgaggtccatggtagaaaaggaaatatcttcgtcataaaaactagacagaatgattctcagaaacttctttctgatgtgtgcgttcaactcacagagtttaacctttcttttcatagagcagttaggaaacactctgtttgtaaagtctgcaagtggatattcagacctctttgaggccttcgttggaaacgggatttcttcatactgtgctagacagaagaattcccagtaacttgccttgtgttgtgtgtgttcaactcacagagttgaactttcatttacacagagcagatttgaaacactctttttgtggaatttgcaaatggagatttcaagcgctttgaggccaaagacagaaaaggaaatatcttcgtataaaaactagacagaatcattctcagaaactgctctgtgatgtgtgcgttcaactctcagagtttaacttttcttttcattcagcagtttggaaacactctgtttgtaaagtctgcacgtgcataatttgaccacttagaggtcttcgatggaaacgggtttttttcatgtaaggctagacagaagaattcccagtaacttccttgtgttgtgtgcattcaactcacagagttgaacgttcccttagacagagcagatttgaaacactctatttgtgcaatttgcaagtgtagatttcaagcgctttaaggtcaatggcagaaaaggagatatcttcgtttcaaaactagacagaatcattcccacaaactgcgttgtgatgtgttcgttcaactcacagagtttaacctttctcttcatagagcagttaggaaacactctgtttgtgaagtctgtaagtggatattctgacatcttgtggccttcgttggaaacgggatttcttcatattctgctagactgaagaattctcagtaacttccttgtgttgtgtgtattgaactcacagtgttgaacgatcctttacacagagcagacttgaaacactctttttgtggaatttgcaagtggagatttcagccgctttgaggtcaacagtagaaaaggaaatatcttcgtagaaaaactagacagaatgattctcagaaactcctttgtgatgtgtgcgttcaactcacagagtttaacctttctgttcatagagcagttaggaaacactctgtttgtaaagtctgcaagaggatattcagacctccttgaggccttcgttggaaacgggatttcttcatattctgctagacagaagaattctcagtaacttccttgtgttgtgtgtattcaactgacagagttgaactttcatttagagagagcagatttataacactgtttttgtggaatttgcaagtggagatttcaagcgctttggggccaaaggcagaaaaggaaatatcttcgtataaaaactagacagaatcattctcagaaactgatgcgtgatgtgtgcgttcaactctcagagtttaacttttcttttcattcagcggtttggaaacactctgtttgtaaagtctgcacgtggatattttgaccacttagaggccttcgttggaaacgggtttttttcatgtaaggctagacagaagaattcccagtaacttccttgtgttgtgtgcattccactcacagagttgaacgttcccttagacagagcagatttgaaacactctatttgtgcaatttgcaagtgtagatttcaagcgctttaaggtcaatggcagaaaaggaaatatcttcgtttcaaaactagacagaaacattcccacaaactgcgttgtgatgtgttcgttcaactcacagagtttaacttttctgttcatagagcagttaggaaacactctgtttgtaaagtctgcaattggatattcagacctccttgaggcattcgttggaaacgggatttcttcatattctgctagacagaataattctcagtaacttccttgtgttctgtgtattcaactcacagagttgaacgatcctttacagagagcagactttaaacactctttttgtggaatttgcaagtggagatttcagccgctttgaggtcaatggtagaaaaggaaatatcttcgtataaagactagacagaatgattctcagaaactcctttgagatgtgtgcgttcaactcacagagtttaacctttcttttcatagagcagttaggaaacactctgtttgtaaagtctgcaagtggatattcagacctctttgaggccttcgttggaaacgggtttttttcatataaggctagacagaagaattctcagtaacttccttgtgttgtgtgtattcaactcacagagttgaatgatcctttacacagagcagacttgaaacactctttttgtggaatttgcaagtggagatttcagccgctttgaggtcaatggtagaaaagtaaatatcttcctataaagactagacagaatcattctcagaaactgctctgcgatgtgtgcgttcaactctcagagtttaacttttcttttcattcagcagtttggaaacactctgtttgtaaagtctgcacgtggataacttgaccacttagaggccttcgttggaaacgggtttttttcctgtaaggctagacagaagaattcccagtaacttacttgtgttgtgtacattcaactcacagagttgaacgttcccttagacagagcagatttgaaacactctttttgtgcaattggcaagtggtgatttcagctgctttgaggtcaatggtagaaaagggaatatcttcgtataaaaactagacagaatcattcccacaaactgcgttgtgatgtgttcgttcaactcacagagtttaacctttcttttcatagagcagttaggaaacagtctgtttgtaaattctgtaaatggatattctgacatcttgtggccttcgttggaaactggatttcttcatactatgctagacagaagaattctcagtaacttccttgttttgtgtgtattcaactcacagagttgaacgatcctttacacagagcagacttgaatcactctttttgtggaatttgcaagtggagatttcagccgcgttgaggtcaatggtagaaaaggaaatatcttcgtataaaaactagacagaatgattctcagaaactcctttgtgatgtgtgcgttcaactcacagagtttaacctttcttttcatagagcagttaggaaacactctgtttgtaaagtctgcaagtggatattcagacctactttgaggccttcgttggaaacgggtttttttcatataaggctagacagaagaattctcagtaacttccttgtgttgtgtgtattcaactgacagagttgaactttcatttagagagagcagatttgaaacactgtttttgtggaatttgcatgtggagatttcaagcgctttggggccaaaggcagaaaaggaaatatcttcgtataaaaactagacagaatcattctcagaaactgctctgcgatgtgtgcgttcaactctcagagtttaacttttcttttcattcagcagtttggaaacactctgtttgtaaagtctgcacgtggataacttgaccacttagaggccttcgttggaaaagggtttttatcctgtaagggtagacagaagaattcccagtaacttccttgtgttgtgtgcattcaactcacagatttgaacgttcccttagacagagcagatttgaaacactctatttgtgcaattggcaagtgtagatttcaagcgctttaaggtcaatggcagaaaaggaaatatcttcgtttcaaaactagacagaatcattcccacaaaatgcgttgtgatgtgttcgttcaactcacagagtttaagctttctgttcatagagcagttaggaaacactctgtttgtaaagtctgtaagtggatattctgatatcttgtggccttcgttggaaacgggatttcttcatattatgctagacagaagaattcccagtaacttccttgtgttgtgtgcattcaactcacagagttgaacgttcccttagacagagcagatttgaaacactctatttgtgcaatttgcaagtgtagatttcaagcgctttatggtcaacggcagaaaagtaaatatcttcgtataaagactagacagaatgattctcagaaactcctttgtgatgtgtgcgttcaactcacagagtttaacctttcttttcatagagcagttaggaaacactctgtttgtaaagtctgcaagtggatattcagacctccttgaggccttcgttggaagcgggatttcttcatattctgctagacagaagaattctcagtaacttccttgtgttgtgtgtattcaactgacagagttgaactttcatttcgagagagcagatttgaaacactgtttttgtggaatttgcaagtggagatttcaagcgctttggggctaaaggcagaaaaggaaatatcttcgtataaaaactagacagaataattctcagaaactgctgcgtgatgtgtgcgttcaactctcagagtttaacttttcttttcattcagcggtttggaaacactctgtttgtaaagtctgcacgtggatatattgaccacttagaggccttcgttggaaacgggtttttgcatgtaaggctagacagaagaattcccagtaacttccttgtgttgtgtgcattcaactcacagagttgaacgttcccttagacagagcagatttcaaacactctatttgttcaatttgcaagtgtagatttcaagcgctttaaggtcaatggcagaaaaggaaatatcttcgtttcaaaactagacagaatcattcccacaaactgggttgtgatgtgttcgttcaactcacagagtttaacctttcttttcatagagcagttaggaaacagtctgtttgtcaattctgtaagtggatattctgacatcttgtggccttcgttggaaacgggatttcttcatattctcctagacagaagaattctcagtaacttccttgtgttgtgtgtattcaactcacagagttgaacgatcctttacacagagcagacttgaaacactctttttgtggaatttgcaagtggagatttcagccgctttgagttcaatggtagaataggaaatatcttcctatggaaactagacagaatgattctcagaaactcctttgtgatgtgtgcgttcaactcacaagagtttaacctttctgttaatagagcagttaggaaacactctgtttgtaaagtctgcaagtggatattcagacctccttgaggccttctttggaaacgggatttcttcatattctgctagacagaagaattctcagaaacttccttgtgttgtgtgtattcaactcacagagttgaacgatcctttacacagagcagacttgaaacactctttttgtggaatttgcaagtggagatttcagccgctttgaggtccatggtagaataggaaatatcttcctatagaaactagacagaatcattctcagaaactgctctgcgatgtgtgcgttcaactctcagactttaacttttcttttcattcagcagtttggaaacactctgtttgtaaagtctgcacgtgcataatttgaccacttagaggccttcgttggaaacgggtttttttcatgtaaggctagacagaagaattcccagtaacttccttgtgttgtgtgcattcaactcacagagttgaacgttcccttagacagagcagatttgaaatactctatttgtgcaatttgcaagtgtagttttcaagctctttaaggtcaacggcagaaaaggaaatatcttggtttcaaaactagacagaatcattcccagaaactgcgttgtgatgtgttcgttcaactcacagagtttaacctttctgttcatagagcagttaggaaacactctgtttgtaaagtctgtaagtggatattctgacgtacttgtggccttcgttggaaacgggatttcttcatattctgctagacagaagaattctcagtaacttccttgtgttgtgtgtattcaactcacagagttgaacgatcctttacacagagcagtcttgaaacactctttttgtggaatttgcaagtggagatttctgccgctttggggccaaaggcagaaaaggaaatatcttcgtataaaaactagacagaatgattctcagaaactcctttgtgatgtgtgtgttcaactcacagagtttaacctttcttttcatagagcagttaggaaacactctgtttgtaaagtctgcaagtggatattcagacctccttgaggccttcgttggaaacgggatttcttcatattatgccagacagaagaattctcagtaacttccttgtgttgtgtttattcaactgacagagttgaactttcatttagagacagcagatttgaaacactgtttttgtggaatttgcaagtggagatttcaagcgctttggggccaaaggcagaaaacgaaatatcttcgtataaaaactagacagaatcattctcagaaactgctgcgtgatgtgtgcgttcaactctaagagtttaacttttcttttcattcagcggtttggaaacactctgtttgtaaagtctgcacgtggatattttgaccactaagaggccttcgttggaaacgggtttttttcatgtaaggctagacagaagaattcccagtaacttccttgtgttgtgtacattcaactcacagagttgaaagttcccttagacagagcagatttgaaacactctttttgtgccattggcaagtggagatttcaagcgctttaaggtcaatggcagaaaaggaaatatcttcgtttcaaaactagacagaatcattcccacaaactgcgttgtgatgtgttcgttcatctcacagagtttaacctttcttttcatagagcagttaggaaacactctgtttgtaaattctgtaagtggatattctgacatcttgtggccttcgttggaaaagggatttcttcatcttctgctagacagaagaattctcagaatcttccttgtgttgtgtgtattcaactcacacagttgaacgatggtttacacagagcagatttgaaacactctttttgtggaatttggaagtggagatttcagccgctttgaggtcaatggtagaaaaggaaatatcttcgtataaaaactagacagaatgattttcatgaactcctttgtgatgtgtgcgttcaactaacagagtttaacctttcttttcatagagcagttaggaaacactctgtttgtaaagtctgcaagtggatattcagacctccttgaggccttcgttggaaacgggatttcttcatattctgctagacagaagaattcccagtaacttccttgtgttgtgtgtgttcaactcacagagttgaactttcatttacacagagcagatttgaaacactctttttgtggaatttgcaagtggagatttcaagcgctttgaggccaaaggcagaaaagtaaatatcttcgtataaaaactagacagaaatcattctcagaaactgctctgcgatgtgtgcgttcaactctcaggagtttaacttttcttttcattcagcagtttggaaacactctgtttgtaaagtctgcacgtggatattttgaccacttagaggccttcgttggaaacgggtttttttcctgtaaggctagacagaagaattcccagtaacttccttgtgttgtgtgcattcaactcacagagttgaactttcccttagacagagcagatttgaaacactctatttgtgcaatttgcaagtgtagatttcaagcgctttaaggtcaatggcagaaaaggaaatatcttcgtttcaaaactagacagaatcattcccacaaactgcgttgtgatgtgttcgttcaactcacagagtttaacctttctgttcatagagcagttaggaaacactctgtttgtaaagtctgtaagtggattttctgacatcttgtggccttcgttggaaacgggatttcttcatattctgctacacagaataattctcagtaacttccttgtgttgtgtgtattcaactcacagagttcaacgatcctttacacagagcagacttgaaacactctttttgtggaatttgcaagtggagatttcagccgctttgaggtcaatggtagaaaaggaaactatcttcgtataaagactagaaagaatgattctcagaaactcctttgtgatgtgtgcgttcaactcacagagtttaacctttcttttcatagagcagttaggaaacactctgtttgtaaactctgcaagtggatattcacacctctttgaggccttcgttggaaacgggatttcttcatactgtgctagacagaagaattctcagtaacttccttgtgttgtgtgtattcaactcacagagttgaacgatcctttacacagagcggagttgaaacactctttttgtggaatttgcaagtggagatttcagccgcattgaggtcaatggtagaaaaggaaatatcttcgtataaaaactagacagaatcattctcagaaactgctctgcgatgtgtgcgttcaactctcagagttcaacttttcttttcattcagcagtttggaaacactctgtttgtaaagtctgcacgtggataatttgaccacttagaggccttcgttggaaacgggtttttttcatgtaaggctagacagaagaattcccagtaacttccttgtgttgtgtacattcaactcacagagttgaacgttcccttagatagagcagatttgaaacactctttttgtgcaattggcaagtggagatttcaagcgctttaaggtcaatggcagaaaaggaaatatcttcgtttcaaaactagacagaatcattcccacaaactgcgttgtgaggtgttcgttcaactcacagagtttaacctttcttttcatagagcagttaagaaacagtctgtttgtaaattctgtaagtggatattctgacatcttgtggccttcgttggaaacgggatttcttgatattctgctagacagaagaattctcagtaacttccttgtgttgtgtgtattcaactcacagagttgaacgatcctttacacagagcagacttgaaacactctttttgtggaatttgcaagtggagatttcagccgctttgaggtcaatgttagaataggaaatatcttcctataaaaactagacagaaagattctcagaaactcctttgtgatgtgtgcgttcaactcacagagtttaacctttcttttcatagagcagttaggaaacactctgtttgtaaagtctgcaagtggatattcagacctctttgaggccttcgttggaaacgggtttttttcatataaggctagagagaagaattctcagtaacttccttgtgttgtgtgtattcaactgacagcgttgaactttcatttagagagagcagatttgaaacactgtttttgtggaatttgcaagtggagatttcaagcgctttggggccaaaggctgaaaaggaaatatcttcgtataaaaactagacagaatgattctcagaaactcctttgtgatgtttgctttcaaatcacagagtttaacctttcttttcatagagcagttaggaaacactctggttgtaaagtctgcaagtggatattttgaccacttagaggtcttcgttggaaacgggtttttttcatgtaaggctagacagaagaattcccagtaacttccttgtgttgtgtgcattcaactcacagagatgaacgttcccttagacagagcagatttgaaacactctatttgtgcaatttgcaagtgtagatttcaagcgctttaaggtcaatggcagaaaaggaaatatcttcgtttcaaaactagacagaatgattctcagaaactcctttgtgatgtgtgcgttcaactcacagagtttaacctttcttttcatagagcagttaggaaacactctgtttgtaaagtctgcaagtggatattcagacatctttgaggctttcgttggaaacgggatttcttcacattctgctagacagaagaattctcagaaacttcgttgtgttgtgtgttttcaactcacagagttcaacgatcctttacacagagcagacttgaaacactctttttgtggaatttgcaagtggagatttcagccattttgaggtcaacgttagaaaaggaaatatcttcgtataaaaactagacagaatgattctcaaaaactcctttgtgatgtgtgcgttcaactcacagagttcaacctttcttttcctagagcagttgggaaacactctgtttgtaaagtctgcaagtggatattcagacatccttgaggctttcgttggaaacgggatttcttcatattctgctatacagaagaattcccagtaacttccttgtgttgtgtgtgttcaactcacagagttgaactttcatttacacagagcagatttgaaacactctttttgtggaatttgcaattggagatttcaagcgctttgaggccaaaggcagaaaaggaaatatcttcgtttcaaaactagacagaatcattcccagaaactgctcggcgatgtgtgctttccactctcagagtttaacttttcttttcattcagcagtttggaaacactctttttttaaagtctgcacgtggatattttgacctcttagagtccttcgttggaaacgggtttttttcctgtaaggctagacagaagaattcccagtaacttccttgtgttgtgtacattcaactcacagagttgaacgttcccttagacagagcagatttgaaacactctttttgtgcaattggcaaatggagatttcaagggctttaaggtcaatggcagaaaaggaaatatcttcgtttcaaaactagacagaatcattcccacaaactgcgttgtgatgtgttcgttcaactcacagagtttaacctttctgttcatagagcagttaggaaacactctgtttgtaaagtctgtaagtggatattctgacatcttgtggccttcgttggaaacggtatttcttcctcttctgctagacagaagaattctcagtaacttccttgtgttgtgtgtatttaactcacagagttgaacgatcctttacacagagcagacttgaaacactctttttgtggaatttgcaagtggagatttcagccgctttgaggtcaatggtagaaaaggaaactatcttcatataaagactagacagaatgattctcagaaactcctttgtgatgtgtgcgttcaactcacagagtttaaccttacttttcatagagcagttaggaaacactctgtttgtaaagtctgcaagtggatattcagacatctttgaggccttcgtttgaaacgggatttcttcatgttctgctagacagaagaattcccagtaacttccttgtgttgtgtgtgttcaactcacagagttgaactttcatttacacagagcagatttgaaacactctttttgtggaatttgcaaatggagatttcaagcgctttgaggccaaaggcagaaaaggaaatatgttcgtataaaaactagacagaatcattctcagaaactgctctgcgatgtgtgcgttcaactctcagagtttaacttttcttttcattcagtagtttggaaacactctgtttgtaaagtctgcacgtggataacttgaccacttagaggccttcgttggaaacgggtttttttcatgtaaggctagacagaagaattcccagtaacttccttgtgttgtgtgcattcaactcacagagttgaacgttcccttagacagagcagatttgaaaaactctatttgtgcaatttgcaagtgtagatttcaagcgctttaaggtcaacaggcagaaaaggaaatatcttcgtttcaaaactagacagaatgattctcagaaactcctttgtgatgtgtgcgttcaactcacagagttcaacctttcttttcatagagcagttgggaaacactctgtttgtaaagtctgcaagtggatattcaggcttctttgaggccttcgttggaagcgggatttcttcatattcagctagacagaagaattctcagtaactgccttgtgttgtgtgtattcaactcacagagttgaacgatcctttacacagagcagacctgaaacactctttttgtggaatttgcaagtggagatttcagccgctttgaggtcaatggtagaataggaaatatcttcctatagaaattagacagaatgattctcagaaactcctttgtgatgtgtgtgttcaactcacagagtttaacctttcttttcatagagcagttagtaaacactctgtttataaagtctgcaagtggatattcagacccctttgaggccttcgttggaaacggtatttcttcatattatgctagacagaagaattcccagtaacttccttgtgttgtgtgtgttcaactcacagagttgaactttcatttacacagagcagatttgaaacactctttttgtggaatttgcaagtggagatttcaagcgctttgaggccaaaggcagaaaaggaaatatctccgtttcaaaactagacagaatcattctcagaaactgctctgcgatgtgtgcgttcaactctcagagtttaacttttcttttcattcagcagttcggaaacactctgtttgtaaagtctgcacgtggatattttgaccacttagaggccttcgttggaaacgggtttttttcctgtaaggctagacagaagaattctcagtaacttccttgtgttgtgtgtattcaactcacagagttgaacaatcttttacacagagcagacttgaaacactctttttgtggaatttgcaaatggagatttcagccgctttgaagtcaaaggtagaaagggaaatatcgtcgtataaaaactagacagaatgattctcagaaactcctttgtgatgtgtgcgttcaactcacagagtttaacctttcttttcatagagcagttaggaaacactctgtttgtaaagtctgcaagtagatattcagacctctttgaggccttcgttggaaacgggtttttttcatataaggctagacagaagaattcccagtaacatccttgtgttgtgtgtattcaactcacagagttgaactttcatttacacagagcagatttgaaacactctttttgtggtatttgcaagtggagatttcagtcgctttgatgtgaatgatagaaaaggaaatatcttcgtataaaaactagacagaatgattctcataaactcctttgtgatgtgtgcgttcaactcaccgagtttaacctttcttttcatagagcagttaggaaacactctgtttgtaaagtctgcaagtggatattcagacctctttgaggcattcattggaaacgggatttcttcatattctgctagacagaagaattcccagtaacttccttgtgttgtgtgtgttcaactcacagagttgaactttcatttacacagagcagatttgaaacactctttttgtggaatttgcaagtggagatttcaagcgctttgaggccaaaggcagaaaaggaaatatcttcgtataaaaactcgacagaatcattctcagaaactgctctgcgatgtgtgcgttcaactctcagagtttaacttttcttttcattcagcagtttggaaacactctgtttgtaaagtctgcacgtggatattttgaccacttagaggccttcgttggaaacgggtttctttcctgtaaggctagacagaagaattcccagtaacttccttgtgttgtgtgcattcaactcacagagttgaacgttcccttagacagagcagatttgaaacactctatttgtgcaatttgcaagtgtagttttcaagctctttaaggtcaacggcagaaaaggaaatatcttggtttcaaaactagacagaatcattcccacaaactgcgttgtgatgtgttcattcaactcacagagtttaacctttctgttcatagagcagttaggaaacactctgtttgtaaagtctgtaagtggatattctgacatcttgtggccttcgttggaaacgggatttcttcatattatgctagacagaagaattctcagtaacttccttgtgttgtgtgtattcaactcacagagttgaacgatcctttacacagagcagacttgaaacactctttttgtgtaatttgcaagtggagatttcagccgctttgaggtcaatagtagaaaaggaaatatcttcatagaaaaactagacagaatgattctcagaaactcctttgtgatgtgtgcgttcaactcacagagtttaacctttctttttatagagcagttaggaaacactctctaaagtctgcaagtggatattcagacctccttgaggtcttcgttggaaacgggatttcttcatattatgctagacagaagaattctcagtaacttccttgtgttgtgtgtattcaactgacagagttgaactttcatttagagagagcagatttgaaacactgtttttgtggaatttgcaagtggagatttcaagcgctttggggccaaaggcagaaaaggaaatatcttcgtgtaaaaactacacagaatcattctcagaaactgctctgcgatgtgtgcgttcaactctcagagtttaacttttcttttcattcagaagtttggaaacactctgtttgtaaagtctgcacgtggataacttgaccacttagaggccttcgttggaaacgggtttttttcatgtaaggctagacagaagaattcccagtaacttccttgtgttgtgtgcattcaactcacagagttgaacgttcccttagacagagcagatttgaaacactctatttgtgcaatttgcaagtgtagttttcaagctctttaaggtcaacggcagaaaaggaaatatcttcgtttcaaagctagacagaatgattctcataaactcctttgtgatgtgtgcgttcaactcacagagtttaacttttcttttcatatagcagttaggaaacactctgtttgtaaagtctgaaagtggatattcagacctctttgaggccttcgttggaaatgggatttcttcatattatgctagacagaagaattctcagaatcttccttgtgttgtgtgtattcaactcacagagttgaacgatcctttacacagagcagacttgaaacactctttttgtggaatttgcaagtggagatttcagccgctttgaggtccatggtagaaaaggaaatatcttcggataaaaactagacagaatgattctcagaaactcctttgtgatgtgtgcgttgaactcacagagtttaacttttcttctcatagagcagttaggaaacactctgtttgtaaagtctgcaagtggatattcagacctccttgaggccttcggggaaaacgggatttcttcatattctgctagacagaagaattcccagtaacttccttgtgttgtgtgtgttcaactcacagagttgaactttcatttacacagagcagatttgaaacactctttttgtggaatttgcaagtggagatttcaatcgctttgaggccaaaggcagaaaaggaaatatcttcgtttcaaaactagacagaaatcattctcagaaactgctctgcgatgtgtgcgttcaactctcaggagtttaacttttcttttcattcagcagtttggaaacactctgtttgtaaagtctgcacgtggatattttgaccacttagaggccttcgttggaaacgggtttttttcctgtaaggctagacagaagaattcccagtaacttccttgcgttgtgtacattcaactcacagagttgaacgttcccttagacagagcagatttgaaacactctttttgtgcaattggcaagtggagatttcaagcgctttaaggtcaatggcagaaaaggaaatatcttcgtttcaaaactagacagaatgattctcagaaactcctttgtgatgtgtgcgttcaactcacagagtttaacctttcttttcatagagcagttaggaaacactctgtttgtaaagtctgcaagtggatattcagacctccttgaggccttcgttggaaacgggatttcttcatactatgctagacagaagaattctcagtaacttccttgtgttgtgtgtattcaactcacagagttgaacgatcctttacacagagcagacttgtaacactctttttgtggaatttgcaagtggagatttcagccgctttgaagtcaaaggtagaaaaggaaatatcttcctattaaaactagacagaatgattctcagaaactcctttgtgatgtgtgcgttcaactcacagagtttaacttttcttttcatagagcaattaggaaacactctgattgtaaagtcttcaagtggatattcagacctctttgaggccttcgttggaaacgggatttcttcatattctgctagacagaagaattctcagtaacttccttgtgttgtgtgtattcaactgacagagttgaactttcatttagagagagcagatttgaaacactgtttttgtggaatttgcaagtggagatttcaagcgctttggggccaaaggcagaaaaggaaatatcttcgtataaaaactagacagaatcattctcagaaactgctgcgtgatgtgtgcgttcaactctcagagtttaacttttcttttcattcagctgtttggaaacactctgtttgtaaagtctgcacgtggaaattttgaccacttagaggccttcgttggaaacgggattttttcatgtaaggctagacagaagaattcgcagtaacttccttgtgttgtgtacattcaactcacagagttgaacgttcccttagacagagcagatttgaaacagtctttttgtgcaattggcaagtggagatttcaagcgctttaaggtcaatggcagaaaaggaaatatcttcgtttcaaaactagacagaatgattctcagaaactcctttgtgatgtgtgcgttcaactcacagagtttaacctttcttttcatagagcagttaggaaacactctgtttgtaaagtctacaagtggatattcggacctccttgaggccttctttggaaacgggatatcttcttattatgctacacagaaaaattctcagtaacttccttgtgttgtgtgtattcaactcacagagttgaatgatcctttacacagagcagacttgaaacactctttttgtggaatttgcaagtggagatttcagccgctttgaggtcaatggtagaataggaaatatcttcctatagaaactagacagaatgattctcagaaactcctttgtgatgtgtgtgttcaactcacagagtttaacctttcttttcatagagcagttagtaaacactctgtttataaagtctgcaagtggatactcagacccctttgaggccttcgttggaaacgggatttcttcatattatgctagacagaagaattcccactaacttccttgtgttgtgtgtgttcaactcacaagagttgaactttcatttacacagagcagatttgaaacactctttttgtggaatttgcaagtggagatttcaagcgctttgaggccaaaggcagaaaaggaaatatcttcgtttcaaaactagacagaatcattctcagaaactgctctgcgatgtgtgcattcaactctcagagtttaatttttcttttcattcagcagtttggaaacactctctttgtaaagtctgcacgtggatattttgaccacttagaggccttcgttggaaacgggttttattcctgtaaggctagacagaagaattcccagtaacttccttgtgttgtgtacattcaactcacagagttgaacgttcccttagacagagcagatttgaaatactctttttgtgcaattgggaaatggagatttcaagcgctttaaggtcaatggcagaaaaggaaatatcttcgtttcaaaactagacagaatgattctcagaaagttctttgcgatgtgtgcgttcaactcacagagtttaacctttcttttcatacagcagttaggaaacactctgtaaactctgcaagtggatattcagacctctttgaggccttcgttggaaacgggatttcttcatactatgctagacagaagaattctcagtaactttccttgtgttgtgtgtattcaactcacagagttgaacgatcctttacacagagcagacttgtaacactctttttgtggaatttgcaagtggagatttcagccgctttgaagtcaaaggtagaaaaggaaatatcttcctataaaacgacatagacagaatgattctcagaaactcctttgtgatgtgtgcgttcaactcacagagtttaacctttcttttcatagagcagttaggaaacactctgtttgtaaagtctgcaagtggatattcagacatccttgaggctttcgttggaaacgggatttcttcatgttctgctagacagaagaattcccagtaacttccttgtgttgtgtgtgttgaactcacagagttgaactttcatttacacagagcagatttgaaacactctttttgtggaatttgcaaatggagatttcaagcgctttgaggaaaaaggcagaaaagggaatatcttcgtataaaaactagacagaatgattctcagaaactcctttgtgatgtgtgtgttcacctcacagagtttaacttttcttttcattcagcggtttggaaacactctgtttgtaaagtctgcacgtggatattttgaccacttagaggccttcgttggaaacgggtttttttcatgtaaggctagacagaataattcccagtaacttctttgtgttgtgtacattcaactcacagagttgaacgttcccttagacagagcagatttgaaacactctttttgtgaaattggcaagtggagatttcaagcgctttaaggtcagtggcagaaaaggaaatatcttcgtttcaaaactagacagaatcattcccacaaactgcgttgtgatggttcgttcaactcacagagtttaacctttcttttcatagagcagttaggaaacagtctgtttgtcaattctgtaagtggatattctgacatcttgtggccttcgttggaaacgggatttcttcatattctcctagacagaagaattctcagtaacttccttgtgttgtgtgtattcaactcacacagttgaacgattctttacacagagcagacttgtaacactctttttgtggaatttgcaagtggagatttcagccgctttgaagtcaaaggtggaaaaggaaatatcttcctataaaaactagacagaatgattctcagaaactcctttgtgatgtgtgcgttcaactcacagagtttaacctttcttttcatagagcagttaggaaacactctgtttgtaaagtctgcaactggataatcagacctctttgaggccttcgttggaaacgggatttcttcatattttgctagacagaagaattctcagtaacttcctcgtgttgtgtgtattcaactcacagagttgagcgacgctttacacagagcagacttgaaacactctttttgtggaatttgcaaatggagatttcagccgctttgaggtcaatggttgaaaaggaaatatcttcatataaaaatttgacagaatcattctcagaaactgctctgcgatgtgtgcgttcaactctcagagtttaacttttcttttcattcagcagtttggaaacactctgtttgtaaagcctgcacgtggatattttgaccacttagaggccttcgttggaaacgggtttttttcctgtaaggctagacagaagaattcccagtaacttccttgtgttgtgtgcattcaactcacagagttgaacgttcccttagacagagcagattggaaacactctacttgtgcaatttgcaagtgtagatttcaagcgctttaaggtcaatggcagaaaaggaaatatcttcgtttcaaaactagacagaatcattcccacaaactgcgttgtgatgtgttcgttcaactcacagagtttaacctttctgttcatagagcagttaggaaacactctgtttgtaaagtctgtaagtggatattctgacatcttgtggcgttcgttggaaacgggatttcttcatattctgctagagagaagaattctcagtaacttccttgtgttgtgtgtattcaactcacagagttgaatgatgctttacacagaacagacttgaaacactcttgttgtggaattttaaagtggagatttcagccgctttgaggtcaacggtagaataggtaatatcttcctatagaaactagacagaatgactctcagaaactcctttgtgatgtgtgcgttcaactcacagagtttaacctttcttttcatagagcagttaggaaacactctgtttgtaatgtctgcaagtggatattcagacctctttgaggccttcgttggaaacgggatttcttcatattatgctagacagaagaattcccagtaacttccttttgttgtgtgtgttcaactcacagagttgaactttgatttacacagagcagatttgaaacactctttttgtggaatttgcaagtggagatttcaagcgctttgaggccaaaggcagaaaaggaaatatcttcgtataaaaactagacagaatgattctcagaaactcctttgtgatgtgtgcgatcaactcacagagtttaacctttcttttcatagagcagttaggaaacactctgtttgtaaagtctgcaagtggatattcagacctctttgaggccttcgttggaaacgggtttttttcatataaggctagacagaagaattcccagtaactttccttgtgttgtgtgcgttcaactcacagagttgaactttcatttacacagagcagatttgaaacactctttttgtggaatttgcaaatggagatttcaagcgctttgaggccaaaggcagaaaaggaaatgtacttcgtttcaaaactagacagagtgattctcatcaactcctttgtgatgtgtgcgttcaactcacagagtttaacctttcttttcatagagcagttaggaaacactctgtttgtaaagtctgcaagtggatattcagacctccttgaggccttctttggaaacgggatttcttcatattctgatagacagaagaattctcagtaacttccttgtgttgtgtgtattcaactcacagagttgaacgatcctttacacagagcagacttgaaacacactttttatggaatttgcaagtggagatttcagccgctttgaggtcaaaggtagaaaaggaaactatgttcgtataaagagtagacagaatgattctcagaaaatcctttgtgatgtgtgcgttcaactcacagagtttaacttttcttttcatagagcagttaggaaacactctgtttgtaaagtctgcaagtggatattcagacctctttgaggccttcgttggaaacgggatttcttcatattatgctagacagaagaattctcagtaacttccttgtgttgtgtgtattcaactgacagagttgaactttcatttagagagagcagatttgaagcactgtttttgtggaatttgcaagtggagacttcaagtgctttggggccaaaggcagaaaaggaaataccttcgtataaaaactagacagaatcattctccgaaactgctctgcgatgtgtgccttcagcgctcagagtttaacttttcttttcattcagcagtttggaaacactctgtttgtaaagtctgcacgtggatattttgaccacttagaggccttcgttggaaacgggtttttgtcatgtaaggctagacagaagaattcccagtaacttccttgtgttgtgtgcattcaactcacagagttgaacgttcccttagacagagcagatttgaaacactctatttgtgcaatttgcaagtgtagttttcaagctctttaaggtcaacggcagaaaaggaaatatcttcgtttcaaaactagacagaatcattcccacaaactgcgttgtgatgtgttcgttcaactcacagagtttaacctttccgttcatagagcagttaggaaacactctgtttgtaaagtctgtaagtggatattctgacatcttgtggccatcgttggaaacgggatttcttcatattctgctagacagaagaattctcagtaacttccttgtgttgtgtgtattcaactcacagagttgaacgatcctttacacagagcagacttgaaacactctttttgtggaatttgcaagtggagatttcagccgatttgaggtcaatggtagaaaaggaaatatcttcgtagaaaaactagacagaatgattctcagaaactcctttgtgatgtgtgcgttcaaatcacagagtttaacttttcttttcatagagcagttaggaaacactctgtttgtaaagtctgcaagtggatattcagacctctttgaggccttcgttggaaacgggatttcttcatattatgctagacaggaaaattcccagtaacttccttgtgttgtgtgtgttcaactcacagagttgaactttcatttacacagagcagatttgaaacactctttttgtggaatttgcaagtggagatttcaagcgctttgaggccaaaggcagaaaaggaaatatcttcgtataaaaactagacagaatcattctcagcaactgctgcgtgatgtgtgcgttcaactctcagagtttaccttttcttttcattcagcggtttggaaacactatgtttgtaaagtctgcacgtggatattttgaccacttagaggccttcgttggaaacgggattttttcatctaaggctagacagaagaattcccagtaacttccttgtgttgtgtgcattcaactcacagagttgaacgttcccttagacagagcagatttgaaacactctatttgtgcaattggcaactgtagatttcaagcgtttaaggtcaatggcagaaaaggaaatatcttcgtttcaaaactagacagaatgattctcagaaactcctttgtgatgtgtgcgttcaactcacagagtttaacctttcttttcatagagcagttaggaaacactctgtttgtaaagtctgcaagtggatattcagacatctttgaggctatagttggaaacgggatttcttcatgttctgctagacagaagaattctcagaaacttccttgtgttgtgtgttttcaactcacagagttgaacgatgatttacacagagtagacttgaaacactctttttgtgtaatttgcaagtggagatttcagccgctttgaggtcaatggtagaaaaggaaatatcttcgtataaaaactagacagaatgattctcagaaactcctttgtgatgtgtgcgttcaactcacagagtttaacctttcttttcatagagcagttaggaaacactctgtttgtaaagtctgcaagtggatattcagacctctttgaggccttcgttggaagcgggatttcttcatgttcaggtagacagaagaattctcagtaacttccttgtgttgtgtgtattcaactcacagagttgaacgatcctttccacagagcagacttgaaacactctttttgtggaatttgcaagtggagatttcagccgctttgaggtcaatagtagaaaaggaaatatctttacagaaaaactagacagaatcattctcagaaactgctgcgtgatgtgtgcgttcaactctcagagtttaacttttctttacattcagcggtttggaaacactctgtttgtaaagtctgcacgtggatattttgaccacttagaggccttcgttggaaacgggattttttcatgtaaggctagacagaagaattcccagtaacttccttgtgttgtgtacattcaactcacagagttgaaagttcccttagacagagcagatttgaaacactctttttgtgcaattggcaagtggagatttcaagcgctttaaggtcaatggcagaaaaggaaatatcttcgtttcaaaactagacagaatcattcccacaaactgcgttgtgatgtgttctttcaactcacagagtttaacctttcttttcatagagcagttaggaaacagtctgtttgtaaattctgtaagtagatattctgacatcttgtggccttcgttggaaacgggatttcttcatattctgctagacagaagaattctcagtaacttccttgtgttgtgtgtattcaactcaccgagttgaacgatcctttacacagagcagacttgaaacactctttttgtggaatttgcaagtggagatttcagccgctttgaggtcaatggcagaaaaggaaatatcttcctatagaaactagacagaatgattctcagaaaatcttttgtgatgtgtgcgttcaactcacagagtttaacttttcttctcatagagcagttaggaaagactctgtttgtaaagtctgcaagtggatattcagacctctttgaggtcttcgttggaaacgggatttcttcatattatgctagacagaagaattcccagtaacttccttgagttgtgtgtattgaactcacagagttgaactttcatttacacagagcagatttgaaacactctttttgtggtatttgcaagtggagatttcagcggctttggtgtcaatgatagaaaaggaaatatcttcgtataaaaactagacagaatcattctcagaaactgctgcgtgatgtgtgcgttcaactctcagagtttaacttttcttttcagtcagcggtttggaaacactctgtttgtgaagtctgcacgtggatattttgaccacttagaggccttcgttggaaacgggttttttgcatgtaaggctagacagaagaattcccagtaacttccttgtgttgtgtgtattcaactcacagagttgaacgatcttttacacagagcagacttgaaacactctatttgtgcaatttgcaagtgtagatttcaagcgctttaaggtcaatggcagaaaaggaaatatcttcgtttcaaaactagacagaatcattctcagaaactgctctgtgatgtgtgcgttcaactctcagagttaaacttttcttttcattcagcagtttggaaacactctgtttgtaaagtctgcacgtggataatttgaccacttagaggccttcgttggaaacgggtttttttcatgtaaggctagacagaagagttctcagtaacttccttgtgttgtgtgtattcaactcacacagttgaacgatcctttacagagagcagacttgtaacactctttttgtggaatttgcaagtggagatttcagccgctttgaagtcaaagtagaaaaggaaatatcttcctataaaaactagacagaatgattctcagaaactcctttgtgctgtgtgcgttcaactcacagagtttaacctttcttttcatagagcagttaggaaacactctgtttgttaagtctgcaggtggatattcagacctctttgaggccttcgttggaagcgggatttcttcatattatgctagacagaagaattcccagtaacttccttgtgttgtgtgtgttcaactcacagagttgaactttgatttacacagagcagatttgaaacactctttttgtggaatttgcaagtggagatttcaagcgctttgaggccaaaggcagaaaaggaaatatcttcgtataaaaactggacagaatcattctcagaaactgctctgcgatgtgtgcgttcaactctcagagtttaacttttcttttcattcagcagtttggaaacactctgtttgtaaagtctgcacgtggataacttgaccagttagaggccttcgatggaaacgggtttttttcatgtaaggctagacagaagaattcccagtaacttccttgtgttgtgtgcattcaactcacagagttgaacgttcccttcgacagagcagatttgaaacactctatttgtgcaatttgcaagtgtagatttcaagcgctttaaggtcaacggcagaaaaggaaatatcttcgtttcaaaactagacagaatgattctcagaaactcctttgtgatgtgtgcgttcaactcacagagtttaacctttcttttcatagagcagttaggaaacactctgtttgtaaagtctgcaagtggatattcagaaatctttcaggctttcgttggaaaagggatttcttcatattctgctagacagaagaattctcagaaagttcgttgtgttgtgtgttttcaactcacagagttcaacgatcctttacacagagtagacttgaaacaccctttttgtggaattggcagggtggagatttcagccgctttgaggtcaatggtagaataggaaatatcttcgtataaaaactagacagaatgattatcagaaactcctttgtgatgtgtgcgttcaactcacagagtttaacctttcttttcatagagcagttaggaaacactctgtttgtaaagtctgcaagtggatattcagacctccttgaggccttcgttggaaacgggatttcttcatattatgctagacagaagaattcccagtaacttccttgtgttgtgtgtgttcaacacacagagttgaactttcatttacccagagcagatttgaaacactctttttgtggaatttgcaagtggagatttcaagcgctttgaggccaaaggcagaaaaggaaatatcttcgtttcaaaactagacagaatcattctcagaaactgctgcgtgatatgtgcgttcaactctcagagtttaacttttcttttcattcagcggtttggaaacactctgtttgtaaagtctgcacgtggatattttgaccacttagaggccttcgttggaaacgggtttttttcatgtaaggctagacagaagaattcccagtaacttccttgtgtggggtgcattcaactcacagagttgaacgttctcttagacagagcagatttgaaacactctatttgtgcaatttgcaagagtagatttcaagcgctttaaggtcaatggcagaaaaggaaatatcttcgtttcaaaactagacagaaatcattcccacaaactgcgttgtgatgtgttcgttcaactcacagagtttaacctttcttttcatagagcagttaggaaacagtctgtttgtaaattctgtaagtggatattctgacatcttgtggccttcgttggaaacgggatttcttcatattctgctagacagaagaattctcagtaacttccttgtgttgtgtgtattcaactcacagagttgaacgatcctttacacagagcagacttgaaacactctttttgtggaatttgcaagtggaggtttcagccgctttgaggtcaatagtagaaaaggaaatatcttcctagaaaaactagacagaatgattctcagaaactcctttgtgatgtgtgcgttcaactcacacagtttaacctttcttttcatagagcagttaggaaacactctgtttgtaaagtctgcaagtggatattcagacctccttgaggcattcgttggaaacgggatttcttcatattctgctagacagaagaattctcagtaacttccttgtgttgtgtgtattcaactcacagagttgaacgatcctttacacagagcagacttgaaacactctttttgtggaatttgcaagtggagatttcagccgctttgagttcaatggtagaataggaaatatcttcatatagaaactagacagaatcattctcagaaactgctctgcgatgtgtgcgttcaactctcagagtttaacttttcttttcattcagcagtttggaaacactctgtttgtaaagtctgcacgtgcataatttgaccacttagaggccttcgttggaaacgggtttttttcatgtaaggctagacagaagaattctcagtaacttccttgtgttgtgtgtattcaactcacagagttgaacgatcctttacacagagcagacttgtaacactctttttgtggaatttgcaagtggagatttcagccgctttgaagtcaaaggtagaaaaggaaatatcttgctataaaaactagacagaatcattcccacaaactgctttgtgatgtgttggttcaactcacagagtttatcctttctgttcatagagcagttaggaaacactctgtttgtaaagtctgtaagtggttataatgatatcttgtggccttcgttggaaacgggatttcttcatattctgctagacagaataattctcagtaacttccttgtgttgtgtgtattcaactcacagagttgaacgatcctttacacagagcagacttgaaacactctttttgtggaatttgcaactggagatttcagccgctttgaggtcaatggtagaataggaaatatcttcctatagaaactagacagaatgattctcagaaactcctttgtgatgtgtgcgttcaactcacagagttcaacctttcttttcatagagcagttgggaaacactctgtttgtaaagtctgcaagtggatattcagacttctttgaggccttcgttggaagcggggtttcttcatgttctgctagacagaagaattcccagtaacttccctgtgttgtgtgtgttcaactcacagagttgaactttcatttacacagagcagatttgaaacactctttttgtggaatttgcaaatggagatttcaagcgctttgaggccaaaggcagaaaaggaaatatcttcgtttcaaaactagacagaatcattctcagtaaactgctgcgtgatgtgtgcgttcaactctcagagtttaacttttcttttcattcagcggtttggaaaccctctgtttgtaaagtctgcacgtggatattttgaccacttagaggccttcgttggaaacgggttttttttcatgtaaggctagacagaagaattcccagtaacttccttgttttgtgtacattcaactcacagagttgaacgttcccttagacagagcagatttgaaatactctttttgtgcaattggcaagtggagatttcaagcgctttaaggtcaatggcagaaaaggaaatatcttcgtttcaaaactagacagaatcattcccacaaactgcgttgtgatgtgttcgttcaactcacagagtttaacctttcttttcatagagcagttaggaaacagtctgtttgtaaattctgtaagtggatattctgacatcttgtgaccttcgttggaaacgggatttcttcatattctgctagacagaagaattctcagtaacttccttgtgttgtgtgtattcaactcacagagttgaacgatcctttacacagagcagacttgaaacactccttttgtggaatttgcaagtggagatttcagccgctttgaggtcaatggtagaacaggaaatatcttcctatagaaactagacagaatgattctcagaaactcctttgtgatgtgtgcgttcaactcacagagtttaacctttcttttcatagagcagttaggaaacactctgtttgtaaagtctgcaagtggatattcagacctccttgatggccttcgttggaaaagggatttcttcatattatgctagacagaagaattcccagtaacttctttgtgttgtgtgtgttcaactcacacagttgaactttcatttacacagagcagatttgaaacactctttttgtggaatttgcaagtggagatttcaagcgctttgaggccaaaggcagaaaaggaaatatcttcgtttcaaaactagacagaatcattctcagaaactgctgcgtgatgtgtgcgttcaactctcagagtttaacttttcttttcattcagcggtttcgaaactctctgtttgtaaagtctgcacgtggatattttgaccacttagaggccttcgttggaaacgagtttttttcatgtaaggctagacagaagaattcccagtaacttccttgtgttgtgtgcattcaactcacagagttgaacgttcccttagacagagcagatttgaaacactctatttgagcaatttgcaagtgtagatttcaagcgctttaaggtcaatggcagaaaaggaaatatcttcgtttcaaaactagacagaatcattcccacaaactgcgttgtgatgtgttcgttcaactcacagagtttaacctttcttttcatagagcagttaggaaacagtctgtttgtaaattctgtaagtggatattctgacatcttgtggccttcgttggaaacgggatctcttcatattctgctagacagaagaattctcagtaacttccttgtgttgtgtgtattcaactcacagagttgaacgatcctttacacagagcagaattgaaacattctttttgtggaatttgcaagtggagatttcagccgctttgaggtcaatggtagaataggaaatatcttcctatagaaactagacagaatgattctcagaaactcctttgtgatgtgtgtgttcaactcacagagtttaacctttcttttcatagagcagttaggaaacactctgtttgtaaagtcttcaagtggatattcagacctctttgaggccttcgttggaaacgggtttttttcatataaggctagacagaagaattcccagtaacttccttgtgttgtgtgtgttcaactcacagagttgaactttcatttacacagagcagatttgaaacactctttttgtggaatttgcaaatgcagatttcagccgcgttgaggtcaatggtagaaaaggaaatatcttcgtttcaaaactagacagaatcattctcagaaactgctctgcgatgtgtgcgttcaactctcagagtttaacttttcttttcattcagcagtgtggaaacactctgtttgtaaagtctgaaggtggatattttgaccacttagaggccttcgttggaaacgggtttttttcctgtaaggctagacagaagaattctcagtaacttccttgtgttgtgtacattcaactcacagagttgaacgttcccttagacagagcagatttgaaacactctttttgtgcaattggcaagtggagatttcaagcgctttaaggtcaatggcagaaaaggaaatatcttcgtttcaaaactagacagaatcattccaacaaactgcgttgtgatgtgttcgtttaactcacagagtttaacctttcttttcatagagcagttaggaaacagtctgtttgtaaattctgtaagtggatattctgacatcttgtggccttcgttggaaacgggatttcttcatattctgctagacagaagaattctcagaatcttccttgtgttgtgtgtattcaactcacagcagttgaacgatggtttacacagagcagatttgaaacactctttttgtggaatttgcaagtggagatttcagccgctttgaggtcaatggtagaaaaggaaatatcttcgtataaaaactagacagagagagattctcagaactcctttgtgatgtgtgcgttcaactcacagagttcaacctttcttttcatagagcagttgggaaacactctgtttgtaaagtctgcaagtggatattcagacttctttgaggccttcgttggaagcgggatttcttcatattctgctagacagagaattctcagtaacttccttgtgttttgtgtattcaactgacagagttgaagtttcatttagagagagcagatttgaaacactgtttttgtggaatttgcaagtggagatttcaagcgctttgggaccaaaggcagaaaaggaaatatcttcgtatataaactagacagaatcattctcagaaactgctgcgtgatgtgtgcgttcaactctcagagtttaacttttcttttcattcagccgtttggaaacactctgtttgtaaagtctgcacgtggaaattttgaccacttagaggccttcgttggaaacgggtttttttcatgtaaggctagacagaagaattcccagtaacttccttgtgttgtgtgcattcaactcacagagttgaacgttcccttagaccgagcagatttgaaacactctatttgtgcaatttgcaagtgtagttttcaagctctttaaggtcaacggcagaaaaggaaatatcttcgtttcaaaactagacagaatgattctcagaaactcctttgtgatgtgtgcgttccactcacagagttcaacctttcttttcatagagcagttgggaaacactctgtttgtaaagtctgcaagtggatattcagacttctttgaggccttcgttggaagcgggatttcttcatattctgctagacagaagaattctcagtaacttccttgtgttgtgtgtattcaactcacagagttgaatgatcctttacacagaacagacttgaaacactcttgttgtggaatttgcaagtggagatttcagccgctttgaggtcaacggtagaataggaaatatcttcctataaaaactagacagaatgattctcagaaactcctttgtgatgtgtgcgttcaactcacagagtttaacctttcttttcatagagcagttaggaaacactctgtttgtaaagtctgcaggtggatattcagacatctttgaggctttcgttggaaacggcatttcttcatattctgctatacagaagaattcccagtaacttccttgtgttgtgtgtgttgaactcacagagttgaactttcatttacacagagcagatttgaaaccctctttttgtggaatttgcaagtggagatttcaagcgctttgaggccaaaggcagaaaaggaaatatcttcgtttcaaaactagacagaatgattctcagaaactcctttgtgatgtgtgcgttcaactcacagagtttaacctttcttttcatagagcagttaggaaacactatgtttgtaaaatctgcacgtggatattttgaccacttagaggccttcgttggaaacgggttttttcatgtaagggtagacagaagaattcccagtaacttccttgtgttgtgtacattcaactcacagagttgaacgttcccttagacagagcagatttgaaacactctttttgtgcaattggcaaatggagatttcaagcgctttaaggtcaatggcagaaaagggaatatcttcgtttcaaaactagacagaatcattcccacaaactgcgttgtgatgtgttcgttcaactcacagagtttaacctttcttttcatagagcagttaggaaacactcagtttgtaaagtctgcaagtggatattcagacctctttgaggccttcgttggaaacgggatttcttcatactgtgctagacagaagaattctcagtaacttccttgtgttgtgtgtattcaactcacagagttgaacgatcctttacaaagagcagacttgtaacactctttttgtggaatttgcaagtggagatttcagccgctttgaagtcaaaggtagaaaaggaaatatcttcctataaaaactagacagaatgattctcagaaactcctttgtgatgtgtgcgttcaactcacagagtttaacctttcttttcatagagcagttaggaaacactctgtttgtaaagtctgcacgtggatatttggacttctttgaggccttcgttggaaacggggttttttcatgtaaggctagatagaagaattcccagtaacttccttgtgttgtgtgtcttcaactcacagagttgaactttcatttacacagagcagatttgaaacactctttttgtggaatttgcaaatggagatttcaagcgctttgaggccaaaggcagaaaaggaaatatcttcgtataaaaactagacagaatcattctcagaaactgctgcgtgatgtgtgcgttcaactctcagagtttaacttttcttttcattcagcggtttggaaacactctgtttgtaaagtctgcacgtggatattttgaccacttagaagccttcgttggaaacgggttttttcatgtaaggctagacagaagaattcccagtaacttccttgtgttgtgtgcattcaactcacagagttgaacgttcccttagacagagcagatttgaaacactctatttgtgcaatttgcaagtgtagatttcaagcgctttaaggtcaaaggcagaaaaggaaatatcttcgtttcaaaactagacagaatgattctcagaaactcctttgtgatgtgtgtgttcaactcacagagtttaacctttctattcatagagtagttaggaaacactctgtttgtaaagtctgcaagtgggtattttgacctctttgagacctcctttggaaacgggtttttttcatgtaaggctagacagaagaattctcagtaacttccgcgtgttgtgtgtattcaactcacagagttgaacgatcctttacacagagcagacttgtaacactctttttgtggaatttgcaagtggagatttcagccgctttgaagtcaaaggtagaaaaggaaatatcttcctataaaaaatagacagaatgattctcagaaactcttttgtggtgtgtgcgttcaactcacagagtttaacctttctgttcatagagcagttaggaaacactctgtttgtaaagtctgcaagtggatattcagacctccttgaggccttcgttggaaaccggatttcttcatattctgctagacagaagaattctcagtaatttccttgtgttgtgtgtattcagctgacagagttgaactttcatttagagagagcagatttgaaacactgtttttgtggaatttgcaagtggatatttcaagcgatttgaggccaaaagcagaaaaggaaatatcttcgtataaaaactagacagaatcattctcagtaaactgctctgcgatgtgtgcgttcaactctcagagtttaacttttcttttcattcagcagtttggaaacactctgtttgtaaagtctgcacgtggatattttgaccatttagaggccttcgttggaaacgggtttttttcttgtaaggctagacagaagaattctcagtaacttccttgtgttgtgtgtattcaactcacagagttgaatgatcctctacacagagtagacttgaaacactctttttgtgtaatttgcaagtggagatttcagccgctttgaggtcaatggtagaaaaggaaatatcttcgtataaaaactagacagaatgattatgagaaactcctttgtgatgtgtgcgttcaactcacagagtttaacctttcttttcatagagcagttaggaaacactctgtttgtaaagtctgcaagtggatattcagacctccttgaggccttcgttggaaacgggatttcttcatattatgctagacagaagaattctcagtaacttccttgtgttgtgtgtattcaactcacagagttgaacgatcctttacacagagcagacttgaaacactctttttgtggaatttgcaagtggagacttcagccgctttgaggtcaatggtagaataggaaatatcttcctatagaaactagacagaatgattctcagaaactcctttgtgatgtgtgcgttcaactcacacagtttaacctttcttttcatagagcagttaggaaacactctgtttgtaaagtctgcaagtggatattcagacctccttgatccattcgttggaaatgggaattcttcatattatgctagacagaagaattctcagtaacttccttttgttgtgtgtattcaactgacagagttgaactttcatttagagagagcagatttgaaacactgtttttgtgcaatttgcaagtggagatttcaagcgctttggggcaaaaggcaggaaaggaaatatcttcgtataaaaactagacagaatcattctcagaaaccgctctgtgatgtgtgcgttcaactctcagagtttaacttttcttttcattcagcagtttggaaacactctgtttgtaaagtctccacgtggatattttgaccacttagaagccttcgttggaaacgagttttttttcatgtaaggctagacagaagaattcccagtaacttccttgtgttgtgtgcattcaactcacagagttgaacgttcccttagacagagcagatttgaaacactctatttgtgcaacttgcaagtgtagatttcaagcgctttaagctcaatggcagaaaaggaaatatcttcgtttcaaaactagacagaatcatttccacaaactgcgttgtgatgtgttccttcaactcacagagtttaacctttcttttcatagagcagttaggaaacactctgtttgtaaactctgcaagtggatattcagacctctttgaggccttcgttggaaacgggatttcttcatactatgctagacagaagaattctcagtaacttccttgtgttgtgtgtattcaactcacagagttgaacgatcctttatacagagcagacttgaaacactctttttgtggaatttgcaagtggagatttcagccgcgttgaggtcaatggtagaaaaggaaatatcttcgtataaaaactagacagaatgattctcagaaaatcttttgtgatgtgtgcgctcaactcacagagtttaacttttcttctcatagagcagttaggaaacactctgtttgtaaagtgtgcaagtggatattcagacctctttgaggccttcgttggaaacgggatttcttcatattatgctagacagaagaattctcagtaacttccttgtgttgtgtgtattcaactgacagagttgaactttcatttagagagagcagatttgaaacactgtttttgtggaatttgcaagtggagatttcaagcgctttggggccaaaggcagcaaaggaaatatcttcgtataaaaactagacagaatcattctcagaaactgctgcgtgatgtgtgcgttcaactctcagagtttaacttttcttttgattcagcggtttggaaacactctgtttgtaaagtctgcacgtggatattttgaccacttagaggccttcgttggaaacgggtttttttcatgtaaggctagacagaagaattcccagtaacttccttgtgttgtgtacattcaactcccagagttgaacgttcccttagacagagcagatttgaaacactctttttgtgcaattggcaagtggtgatttcagccgctttggggtcaatggtagaaaaggtaatatcttcgtataaaaactagacagaatcattcccacaaactgcgttgtgatgtgttcgttcaactcacagagtttaacctttctgttcacagagcagttaggaaacactctgtttgtaaagtctgtaagtggatattctgacatcttgtggccttcgttggaaacgggatttcttcatattctgctagacagaagaattctcagtaacttccttctgttgtgtgtattcaactcacagagttgaacgatcctttacacagagcagtcttgaaacactctttttgtggaatttgcaagtggagatttcagccgctttgtggtcaatggtagaataggaaatatcttcctatagaaactagacagaatgattctcagaaactcctttgtgatgtgggcgttcaactcacagagtttaacctttcttttcatagagcagttaggaaacactctgtttgtaaagtctgcatgtggatatttggacttctttgaggccttcgttggaaacgggtttttttcatgtaaggctagacagaagaattcccagtaacttccttctgttgtgtgtgttcgactcacagagttgaactttcatttacacagagcagatttgaaacactctttttgtggaatttgcaagtggagatttcaagcgctttgaggccaaaggcagaaaaggaaatatcttcgtttcaaaactagacagaatcattctcagaaactgctgcgtgatgtgtgcgttcaactctcagagtttaacttgtcttttcattcagcggtttggaaacactctgtttgtaaagtctgcacgtggatattttgaccacttagaggccttcgttggaaacgggtttttttcatgtaaggctagacagaagaattcccagtaacttccttgtgttgtgtgcattcaagtcacagagttgaacgtttccttagacagagcagaattgaaacactctatttgtgcaatttgcaagtgtagatttcaagcgctttaaggtcaatggcagaaaaggaaatatcttcgtttcaaaactagacagaatcattcccacaaactgcgttgtgatgtgttcgttcaactcacagagtttaaccttccttttcatagagcagttaggaaacagtctgtttgtaaattctgtaagtggatattctgacatacttgtggccttcgttggaaacgggatttcttcatattctgctagacagagagattctcagtaacttccttgtgttgtgtgtattcaactcacagagttgcacgatcctttacacagagcagacttgaaacactctttttgtggaatttgcaagtggagatttcagccgcgttgaggtcaatggtagaagaggaaatatcttcgtataaaaactagacagaatgattctcataaactcctttgtgatgtgtgcgttcaactcacagagtttaacctttcttttcatagagcagttaggaaacactctgtttgtaaagtctgcaagtggatattcagacccctttgaggccttcgttggaaacgggatttcttcatattctgccagacaaaagaattcccagtaacttccttgtgttgtgtgtgttcaactcacagagttgaactttgatttacacagagcagatttgaaacactctttttgtggaatttgcaaatggagatttcaagcgctttgaggccaaaggcagaaaaggaaatatcttcgtataaaaactagacagaatcattctcagaaactgctctgcgatgtgtgcgttcaactctcagagtttaacttttcttttcattcagcagtttggaaacactctgtttgtaaagtctgcacgtggatattttgaccacttagaggtcttcgttggaaacgggtttttttcctgtaaggctagacagaagaattcccagtaacttccttgtgttgtgtgcattcaactcacagagttgaacgttcccttagacagagcagatttgaaacactctatttgtgcaatttgcaagtgtagttttcacgctctttaaggtcaacggcagaaaaggaaatatcttcgtttcaaaactagacagaatcattcccacaaactgcgttgtgatgtgtgcgttcaactcacagagtttaacttttcttttcatagagcagttaggaaacactctgtttgtaaagtctgcaagtggatattcagacctctttgaggccttcgttggaaacgggatttcttcatattctgctagacagaagaattctcagtaacttccttgtgttgtgtgtattcaactcacagagttgaacgatcctttacacagagcagacttgaaacactctttgtgtggaatttgcaagtggagatttcagccgctttgaggtgaatggtagaaaaggaaatatcttcgtataaagactagacagaatgattctcagaaactcctttgtgatgtgtgcgttcaactcacagagttcaacctttcttttcatagagcagttgggaaacactctttttgtaaagtctgcaagtggatattcagacttctttgaggccttcgttggaagcgggatttcttcatattctgctagacagaagaattcccagtaacttccttgtgttgtgtgtgttcaactcacagagttgaactttcatttacacagagcagatttgaaacactctttttgtggaatttgcaagtggagatttcaagcgctttgaggccaaggcagaaaaggaaatatcttcgtataaaaactagacagaatcattctcagaaactgctctgcgatgtgtgtgttcacctctcagagtttaacttttcttttccttcagcagtttggaaacactctgtttgtaaagtctgcacgtggataatttgaccacttagaggccttcgttggaaacgggtttttttcatgtaaggctagacagaagaattcccagtaacttccttgtgttgtgtacattcaactcacagagttgaacgttcccttagacagagcagatttgaaacactctttttgtgcaattggcaagtggagatttcaagcgctttaaggtcaatggcagaaaaggaaatatcttcgtttcaaaactaggcagaatgattctcagaaacttcattgtgatgtgtgcgttcaactcacagagtttaacctttcttttcatagagcagttaggaaacactctgtttgtaaactctgcaagtggatattctgacctcattgaggccttcgatggaaacgggatttcttcatactatgctagacagaagaattcacagtaacttccttgtgttgtgtgtattcaactcacagagttgaacgatcctttacacagagcagacttgaaacactctttttgtggaatttgcaagtggagatttcagccgctttgaggtcaatggtagaaaaggaaatatcttcgtataaaaactagacagaatgattctcagaaactcctttgtgatgtgtgcgttcaactcacagagtttaacctttcttttcatagagcagttaggaaacactctgtttttatagtctgcaagtggatattcagacatctttgaggccttcgttggaagcgggatttcttcatattctgctatacagaagaattctcagtaacttccttgtgttgtgtgtattcaactgacagagttgaactttcatttagagagagcagatttgaaacactgtttttgtggaatttgcaagtggagatttcaaacgctttggggccaaaggcagaaaaggaaatgtcttcgtataaaaactagacagaatcattctcagaaactgctctgcgatgtgtgtgttcaactctcagagtttaacttttcttttcattcagcagtttggaaacactctgtttgtaaagtctgcacgtggatattttgaccacttagaggccttcgttggaaacgggtttttttcttgtaaggctagacagaagaattcctagtaacttccttgtgttgtgtacattcaactcacagagttgaacgttcccttagacagagcagatttgaaacactctttttgtgcaattggcaagtggtgatttcagccgctttgaggtcaatggtataaaaggaaatatcttcgtattaaaactagacagaatcattcccacaaactgcgttgtgatgtgttcgttcaactcacagagtttaacctttctgttcatagagcagttaggaaacactctgtttgtaaagtctgtaagtggatattgtgacatcttgtggccttcgttggaaacgggatttcttcatattctgctagacagaagaattctcagtaacttccttgtgttgtgtgtattcaactcacagagttgaatgatcctttacacagaacagtcttgaaacactctttttgtggaatttacaagtggagatttcagccgctttgaggtcaatggtagaataggaaatatctgcctatagaaactagacagaatgattctcagaaactcctttgtgatgtgtgcgttcaacacacagagtttaacttttcttttcatagagcagttaggaaacactctgtttgtaaggtctgcaagtggatattcagacctctttgaggccttcgttggaaacgggatttcttcatattctgctagacagaagaattctcagtaacttccctgtgttctgtgtattcaactcagagagttgaacgatcctttacagagagcagacttgaaacactctttttgtggaatttgcaagtggagatttcagccgctttgaggtcaatggtagaaaaggaaatatcttcgtataaagactagacagaatcattctcagaaactgctctgcgatgtgtgcgttcaactctcagagtttaacttttcttttcattcagcagtttggaaacactctgtttgtaaagtctgcacatggatattttgaccacttagaggccttcgttggaaacgggtttactttacctgtaaggctagacagaagaattcccagtaacttccttgcgttgtgtacattcaactcacagagttgaacgttcccttagacagagcagatttgaaacactctttttgtgcaattggcaagtggagatttcaagcgctttaaggtcaatggcagaaaaggaaatatcttcgtttcaaaactagacagaatcattcccacaaactgcgttgtgatgtgttcgttcaactcacagagtttaacctttctgttcatagagcagttaggaaacactctgtttgtaaactctgtaagtggatattctgacatcttgtggccttcgttggaaacgggatttcttcacattctgctagacagaggaattctcagaaacttccttgtgttgtgtgtattcaactcacagagttgaacgatcctttacacagagcagacttgaaacactctttttgtggaatttgcaagtggagatttcagccgctttgaggtcaatggtagaaaaggaaatatcttcgtataaaaacaagacagaatgattctcagaaactcctttgtgatgtgtgcgttgaactcacagagtttaacctttcttttcatagagcagttaggaaacactctgtttgtaaagtctgcaagtggatattcattcctctttgaggccttcgttggaaacgggatttcttcatattatgctagacagaagaattcccagtaacttccatgtgttgtgtgtgttcaactcacagagttgaactttcatttacacagagcagatttgaaacactctttttgtggaatttgcaaatggagatttcaagcgctttgaggccaaaggcagaaaaggaaatatcttcgtataaaaattagacagattcattctcagaaactgctctgcgatgtgtgcgttcaactctcagagtttaacttttcttttcattcagcagtttggaaacactctgtttgtaaagtctgcacgtggataatttgaccacttagaggtcttcgttggaaacgggtttttttcatgtaaggctagacagaagaattcccagtaacttccttgtgttgtgtgcattcaactcacagagttgaacgttcccttagacagagcagatttgaaacactctatttgtgcaatttgcaagtgtagatttcaagcgctttaaggtcaacggcagaaaaaggaaatatcttcgtttcaaaactagacagaacgattctcagtaaactcctttgtgatgtgtgcgttgaactcacagagtttaacctttcttttcatagagcagttaggaaacactctgtttgtaaagtctgcaagtggatattcagacctctttgaggccttcgttggaaacgggatttcttcatattctgctagacagaagaattctcagaatcttccttgtgttgtgtgtattcaactcacacagttgaacgatggtttacacagagcagatttgaaacactctttttgtggaatttgcaagtggagatttcagccgctttgaggtccatggtagaaaaggaaatatcttcgtataaaaactagacagaatgattctcagaaacttctttgtgatgtgtgcgttcaactcacagagtttaacctttcttttcatagagcatttaggaaacactctgtttgtaaactctgcaagtggatattcagacctgtttgaggccttcgttggaaacgggatttcttcatactatggtagacagaagaattctcagtaacttccttgtgttatgtgtattcaactgacagagttgaactttcatttagagagagcagatttgaaacactgtttttgtggaatttgcaagtggagatttcaagcgctttggggccaaaggcagaaaaggaaatatcttcgtataaaaactagacagaataattctcagaaactgctgcgtgatgtgtgcgttcaactctcagagtttaacttttcttttcattcagcggtttggaaacactctgtttgtaaagtctgcacgtggatattttgaccacttagaggccttcgttggaaacgggtttttttcatgtaaggctagacagaagaattcccagtaacttccttgtgttgtgtatgttcaactcacagagttgaactttcatttacacagagcagatttgaaacactctttttgtggaatttgcaaatggagatttcaagcactttgaggccaaaggcagaaaaggaaatgtcttcgtttcaaaactagacagaatcattcccacaaactgcgttgtgatgtgttcgttcaactcacagagtttaacctttctgttcatagagcagttaggaaacactctgtttgtaaagtctgtaagtggatattctgacatctagtggccttcgttggaaacgggatttcttcatattctgctggacagaataattctcagtaacttccttgtgttgtgtgtattcaactcacagagttgaacgatcctttacacggagcagacttgaaacattctttttgtggaatttgcaagttgagatttcagccgctttgaggtcaatggtagaataggaaatatcttcctatagaaactagacagaaagattctcagaaactcctttgtgatgtgtgtgttcaactcacagagtttaacctttcttttcatagagcagttagtaaacactctgtttataaagtctgcaagtggatattcagacccctttgaggccttcgttggaaacgggatttcttcatattatgctagacagaagaattctcagtaacttccttgtgttgtgtgtattccactcacagagttgaacgatcatttacacagagcagatttgagacactctttttgtggaatttgctaatggagatttcaagcgctttgaggccaaaggcagaaaaggaaatatcttcgtataaaaactagacagaatcattctcagaaactgctctgcgatgtgtgcgttcaactctcagagtttaacttttcttttcattcagcagtttggaaacactctgtttgtaaagtctgcacgtggataatttgaccacttacaggccttcattggaaacgggtttttttcctgtaaggctagacagaagaattcccagcaacttccttgtattgtgtgcattcaactcacagagttgaacgatcctttacacagagcagatttgaaacactctatttgtgcaatttgcaagtgtagatttcaagcgctttgaggtcaatggcagaaaaggaaatatcttcgtttcaaaactagacagaatcattcccacaaactgcgttgtgatgtgttcgttcaactcacagagtttaacctttctgttcatagagcagttaggaaacactctgtttgtaaagtctgtaagtggatattctgacatcttgtggccttcgttggaaacgggatttcttcatattatgctagaaagaagaattcccagtagcttccttgtgttgtgtgtattcaactcacagagttgaattttcatttacacagcacagatgtgaaacactcttgttgtggtatttgcaattggagatatcagccgctttgatgtcaatgatagaaaaggaaatatcttcgtataaaaactagacagaatgattctcagaaactcctttgtgatgtgtgcgttcaactcacagagtttaacctttcttttcatagagcagttaggaaacactctgtttgtaaagtctgcaagtggatattcagacctctttgaggccttcgttggaatcgggatttcttcatattatgctagacagaaggattcccagtaacttccttgtgttgtgtgtgttcaactgacagagttgaactttcatttacaaagagcagatttgaaacactctttttgtggaatttgcaattggagatttcaagcgctttgaggccaaaggcagaaaaggaaatatcttcgtataaaaactagacagaatcattctcagaaactactgtgtgatgtgtgcgttcaactctcagagtttaacttttcttttcattcagcagtttggaaacactctgtttgtaaagtctgaacgtggatattttgaccacttagaggccttcgttggaaacgggtttttttcctgtaaggctagacagaagaattctcagtaacttccttgtgttgtgtacattcaactcacagagttgaacgatcctttacacagagcagacttgtaacactctttttgtggaatttgcaagtggagatttcagccgctttgaagtcaaaggtagaaaatgaaatatcttcctataaaaactagacagaatgattctcagaaactcctttgtgatgtgtgcgttcaactcacagagttcaacctttcttttcatagagcagttgggaaacactctgtttgtaaagtctgcaagtggatattcagacttctttgaggccttcgttggaagcgggatttcttcatgttctgttagacagaagaattctcagtaacttccttgtgttgtgtgtattcaactcacagagttgaacgatcctttacacagagcagacttgaaagactctttttgtggaatttgcaagtggagatttcagccgctttgatgtcaatggtagaaaaggaaatatcttcgtataaagactagatagaatgattctcagaaactcctttgtgatgtgtgcgttcaactcacagagtttaacctttcttttcatagagcagttaggaaacactctgtttgtaaagtctgcaagtggatattcaggcatccttgaggctttcgttggaaacgggatttcttcatattctgctagaaagaagaattcccagtaacttccttgtgttgtgtgtgttcaactcacagagttgaactttcatttacacagagcagatttgaaacactctttttgtggaatttgcaagtggagatttcaagcgctttgaggccaaaggcagaaaagaaggaaatatcttcgtataaaaactagacagaatcattctcagaaactgctctgtgatgtgtgcgttcaactctcagagtttaacttttcttttcattcagcagtttggaaacactctgtttgtaaagtctgcacgtggataatttgaccacttagaggccttcgttggaaacgggtttttttcatgtaaggctagacagaagaattctcaggaacttccttgtgttgtgtgtattcaactcacagagttgtacgatcttttacacagagcagacttgaaacactctttttgtggaatttgcaagtggagatttcagccgctttgaagtcaaaggtacaaaaggaaatatcgtcgtaaaaaaactagacagaatcattcccacaaactgcgttgtgatgtgttcgttcaactcacagagtttaacctttctgttcatagagcagttaggaaacactctgtaacgtctgtaagtggatattctgacatcttgtggccttcgttggaaacgggatttcttcatattctgctagaaagaagaattctcagaatcttccttgtgttgtgtgtattcaactcaccgagttgaacgatcctttacacagagcagacttgaaacactctttttgtggaatttgcaagtggagatttcagccgctttgaggtccatgttagaaaaggaaatatcttcgtataaaaactagacagaatgattctcagaaactcctttgtgatgtgtgcgttcaactcacagagtttaacctttcttttcatagagcagttaggaaacactctgtttgtaaagtctgcaagtggatattcagacctctttgaggccttcgttggaaacgggtatttttcatataaggctagacagaagaattctcagtaacttccttgtgttgtgtgtatacaactcacagagttgaactttcatttagagagagcagatttgaaacactgtttttgtggaatttgcaagtggagatttcaagcgctttggggccaaaggcagaaaaggaaatatcttcgtataaaaactagacagaatcattctcagaaactgctctgcgatgtgtgcgttcaactctcagagtttaacttttcttttcattcaacagtttggaaacactctgtttgtaaagtctgcacgtggatattttgaccacttagaggccttcgttggaaacaggtttttttcatgtaaggctagacacaagaattcccagtaacttccttgtgttgtgtacattcaactcacagagttgaacgttcccttagacagagcagatttgaaacactctttttgtgcaattggcaagtggagatttcaagcgctttaaggtcaatggcagaaaaggaaatatcttcgtttctaaactagacagaatgattctcagaaactcctttgtgctgtgtgcgttcaactcacagagtttaacctttcttttcatagagcagttaggaaacactctgtttgtaaagtctgcaagtggatattcagacatctttgaggctttcgttggaaacgggatttcttcatattctgccagacagaagaattctcagaaacttccttgtgttgtgtgtattcaactcacagagttgaacgatcgtttacacagagcagacttgaagcactctttttgtggaatttgcaagtggagatttcagccgctttgaggtcaatggtagaaaaggaaatatcttcgtataaaaactagacagaatgattctcagaaactcctttgtgatgtgtgcgttcagctcacagagtttaacctttctgttcatagagcagttaggaaacactctgtttgtaaagtctgcaagtggatattcagacctccttgaggccttcgttggaaacgggatttcttcatattctgctagacagaagaattctcagtaacttccttgtgttgtgtgtagtcaactcacagagttgaacgatcctttacacagagcagacttgaaacattctttttgtggaatttgcaagtggagatttcagccgctttgaggtcaatggtagaataggaaatatcttcctatagaaactagacagaacgattctcagaaactcctttgtgatgtgtgcgttcaactcacagagtttaacttttcttttcatagagccgttaagaaacactctgtttgtaaagtctgcaagtggatattcagacctctttgaggccttcgttggaaacgggatttcttcctattctgctagacagaagaattctcagtcacttccttgtgttgtgtgtattcaactcacagagttgaacgatcctttacagagagcagacttcaaacactctttttgtggaatttgcaagtggagatttcagccgctttgaggtcaatagtagaaaaggaaatatcttcgtataaaaactagacagaatcattctcagaaactgctgcgtgatgtgtgcgttcaactctcagagtttaacttttcttttcattcagcggtttggaaacactctgtttgtaaagtctgcacgtggatattttgaccacttagaggccttcgttggaaacgggttttttttcatataaggctagacagaagaattcccagtaacttccttgtgttgtgtgcattcaactcacagagttgaacgttcccttagacagaggagatttgaaacactctatttgtgcaatttgcaagtgtagatttcaagcgctttaaagtcaatggcagaaaaggaaatatcttcgtttcaaaactagacagaatcattcccacaaactgcgttgtgatgtgttcgttcaactcacagagtttaacctttctgttcatagagcagttaggaaacactctgtttgtaaagtctgcaagtgaatattcagacctccttgaggccttcgttggaaacgggatttcttcatattctgctagaccgaagaattctcagtaacttccttgtgttgtgtgtattcaactcacagagttgaatgttcctttacacagagcagacttgaaacactctttttgtggaatttgcaagtggagatttcagccgctttgaggtcaatggtagaaaagtaaatatcttcgtatgaagactagacagaatgattctcagaaactcctttgtgatgtgtgcgttcaactcacagagttcaacctttcttttaatagagcagttgggaaacactctgtttgtaaagtctgcaagtggatattcagacttctttgaggccttcgttggaagcgggatttcttcatattctgctagacagaagaattctcagtaacctccttgtgttgtgtgtattcaactcacagtgttgaacgaccctttacacagagcagacttgaaacactctttttgtggaatttgcaagtggagatttcagccgctttgaggtcaatggtagaataggaaatatcttcctatagaaactagacagaatgattctcagaaactcctttgtgatgtgtgcgttcaactcacagagtttaacctttctgttcatagagcagttaggaaacactgtgtttgtaaagtctgcaagtggatattcagacctccttgagtccttcgttggaaacgggatttcttcatattctgctagacagaagaattcccagtaacttccttgtgttgtgtgcattcaactcacagagttgaacgttcccttagacagagcagatttgaaacactctatttgtccaatttgcaagtgtagatttcaagcgctttaaggtcaacggcagaaaaggaaatatcttcgtttcaaaactagacagaatcattcccacaaactgcgttgtgatgtgttcgttcaactcacagagtttaacctttctgttcatagagcagttaggaaacactctgtttttaaagtctgtaagtggatattctgacatcttgtggccatcgttggaaacgggatttcttcatattctgctagacagaagaattctcggtaacttccttgtgttgtgtgtattcaactcacagagttgaacgatcctttacacagagcagacttgaaacactctttttgtggaatttgcaagtggagatttcagccgctttgaggtcaatggtagaaaaggaaatatcttcgtatgaagactagacagaatgattctcagaaactcctttgtgatgtgtgcgttcaactcacagagtttaacttttcttttcatagagcagttagacaacactctgtttgtaaagtctgcaagtgaatattcagacctctttgaggccttcgttggaaacgggatttcttcatataatgctagacagaagaattctcagtaacttccttgtgttgtgtgtattcaactcacagagttgaacgatcctttacacagagcagacttgtaacactctttttgtggaatttgcaagtggagatttcagccgctttgaagtcaaaggtagaaaaggaaatatcttcctataaaaactagtcagaatgattctcagaaactgctttgtgatgtgtgcgttcaactcacagagtttaacctttcttttcatagagcagttaggaaacactctgtttgtaaagtctgcatgtggatattgagacttctttgaggccttcgttggaaacgggtttttttcatgtaaggctagacagaagaattctcagtaacttccttgtgttgtgtgtattcaactcacagagttgaactttcatttagagagagtagatttgaaacactgtttttgtggaatttgcaagtggagatttcaagcgctttggggccaaaggcagaaaaggaaatatcttcgtataaaaactagacagaatcattctcagaaactgctgcgtgatgtgtgcgttcaactctcagagtttaacttttcttttcattcagcggtttggaaacactctgtttgtaaagtctgcacgtggatattttgaccacttagaggccttcgttggaaacgagtttttttcatgtaaggctagacagaagcattcccagtaacttccttgtgttgtgtgcattcaactcacagagatgaacgttcccttagacagagaagatttgaaacactctatttgtgcaatttgcaagtgtagatttcaagcgctttaaggtcaatggcagaaaaggaaatatcttcgtttcaaaactagacagaatgattctcagaaaattctttgtgatgtgtgcgttcaactcacagagtttaacctttcttttcatagagcagttaggaaacactctgtttgtaaactctgcaagtggatattcagacctctttgaggccttcgttggaaacgggatttctacatactatgctagacagaagaattctcagtaacttccgcgtgttgtgtgtattcaactcacagagttgaacgatcctttacacagagcagacttgaaacactctttttgtggaatttgcaagtggagatttcagccgctttgaggtcaatggtagaaaaggaaatatcttcctataaaaactagacagaatgattctcagaaactcctttgtgatgtgtgcgttcaactcacagagttcaacctttcttttcatagagcagttaggaaacactctgtttataatgtctgcaattggatattcagacctctttgaggccttcgttgaaaacgggatttcttcatattctgctagacagaagaattcccagtaacttccttgtgttgtgtgtgttcaactcacagagttgaactttcatttacacagagcagatttgaaacactctttttgtggaatttgcaaatggagatttcaagcgctttgaggccaaacgcagaaatggaaatatcttcgtataaaaattagacagaatcattctcagaaactgctctgcgatgtgtgcgttcaactctcagagtttaacttttcttttcattcagcagtttggaaacactctgtttgtaaagtctgcacatggataatttgaccacttagaggccttcgttggaaacgggtttttttcatgtaaggctagacagaagaattcccagtaacttccttgtgttgtgtgcattcaactcatagagttgaacgttccttagagagagcagatttgaaacactctatttgtgcaatttgcaagtgtagatttcaagcgctttaaggtcaatggcagaaaaggaaatatcttcgtttcaaaactagacagaatgattctcagaaacttctttgtgatgtgtgcattcaactcacagagtttaacctttcttttcatagagcagttaggaaacactctgtttgtaaactctgcaagtggatattcagacctctttgaggccttcgttggaaacgggtttttttcatataaggctagacagaagaattcccagtaacttccttgtgttgtgtgtattcaactcacagagttgaacgatcctttacacagagcagacttgtaacactctttttgtggaatttgcaagtggagatttcagccgctttgaagtcaaaggtagaaaaggaaatatcttcctataaaaactagacagaatgattctcggaaactcctttgtgatgtgtgcgttcaactcacagagtttaacctttcttttcatagagcagttaggaaacactctgtttgtaaagtctgcaagtggatattcagacctctttgaggccttcgttggaaacgggatttcttcatattctgctagacagaagaattcccagtaacttccttgtgttgtgtgtgttcaactcacagagttgaactttcatttacacagagcaggtttgaaacactctttttgtggtatttgcaaatggagatttcaagcgctttgtggcgaaatgcagaaaaggaaatatcttcgtataaaaactagacagaatcattctcagaaactgctctgcgatgtgtgcgttcaactctcagagtttaacttttcttttcgttcagcagtttggaaacactctgtttgtaacgtctgcacgtgaataatttgaccacttagaggccttcgttggaaacgggtttttttcatgtaaggctagacagaagaattcccagtaacttccttgtgttgtgtacattcaactcacagagttgaacgttcccttagacagagcagatttgaaacactctttttgtgcaattggcaagtggagatttcaagcgctttgaggtcaatggcagaaaaggaaatatcttcgtttcaaaactagacagaatgattctcagaaactcctttgtgatgtgtgcgttcaactcacagagtttaacctttcttttcatagagcagttaggaaacactctgtttgtaaagtctgcaagtggatattcagacctccttgaggccttcgttggaagcgggatttcttcatattatgctagacagaataattctcagtaacttccttgtgttgtgtgtattcaactcacagagttgaacgatcatttacacagagcagacttgaaacactctttttgtggaatttgcaagtggagatttcagccgcttgaggtcaatggtagaaaaggaaactatcttcgtataaagactagacagaatgattttcagaaactcctttgtgatgtgtgcgttcaactcacagagtttaacctttcttttcatagagcagttaggaaacactctgtttgtaaagtctgcaagtggatattcagacctccttgaggccttctttggaaacgggatttcttcatattctgatagacagaagaattctcagtaacttccttttgtggtgtgtattcaactcacagagttgaatgatcctttacacagaacagtcttgaaacactctttttgtggaatttgcaagtggagatttcagccgctttgaggtcaatggtagaataggaaatatcttcctatagaaactagacagaattattctcagaaactcctttttgatatgggtgttcaactcaccgagtttaacctttcctttcatagagcagttaggaaacactctgtttgtaaagtctgcaagtggatatttccacctctttgaggccttcgttggaaacgggttttttttcatgtaattctagacagaagaattctcagtaacttccttgtgttgtgtgtattcaactgacagagttgaactttcatttagagagagcagatttgtaacactgtttttgtggaatttgcaagtggagatttcaagagctttggggccaaaggcagaaaaggaaatatcttcgtataaaaactagacagaatcattctcagaaactgcggcgtgatgtgtgcgttcaactctcagagtttaacttttcttttcattcagcggtttggaaacactctgtttgtaaagtctgcacgtggatattttgaccacttagaggccttcgttggaaacgggtttttctcatgtaaggctagacagaagaattcccagtaacttccttgtgttgtgtgcattcaactcacagagttgaacgttcccttagacagagcagatttgaaacactctatttgtgcaatttgcaagtgtagatttcaagcgctttatggtcaacggcagaaaaggaaatatcttcgtttcaaaactagacagaatgattctcagaaactgctttgtgatgtgtgcgttcaactcacagagttcaacctttcttttcatagagcagttgggaaacactctgtttgtaaagtctgcaagtggatattcagacatccttgaggctttcgttggaaacgggatttcttcatattctgccagaaagaagaattctcagaaacttcctggtgttgcgtgttttcaactcacagagttcaacgatcctttacacagagtagacttgaaaaactctttttgttgaattggccagtggagatttcagccgctttgaggtcaatggtagaaaaggaaatatcttcgtataaaaactagactgaatgattctcagaaactcctttgtgatgtgtgcgttcaactcgcagagtttaacctttcttttcatagagcagttaggaaacactctggttgtaaagtctgcaagtggatattcagacctcgttgaggccttcgttggaaacgggatttcttcatattatgctagacagaagaattcccagtaacttccttgtgttgtgtgtgttcaactcacagagttgaactttcatttacacagagcagatttgaaacactctttttgtggaatttgcaagtggagatttcaagcgctttgaggccaaaggcagaaaaggaaatatcttcgtttcaaaactacacagaatcattctcagaaactgctgcgtgatgtgtgcgatcaacactcagagtttaacttttcttttcattcagcggtttggaaacactctgtttgtgaagtctgcacgtggaaattttgacaacttagagaccttcgttggaaacgggattttttcatgtaaggctagacagaagaattcccagtaacttccttgtgttgtgtgcattcaactcacagagttgaacgttcccttagaccgagcagatttgaaacactctatttgtgcaatttgcaagtgtagttttcaagctctttaaggtcaacggcagaaaaggaaatatcttcgtttcaaaactatacagaatcattcccacaaactgcgttgtgatgtgttcgttcaactcacagagtttaacctttctgttcatagagcagttaggaaacactctgtgtgtaaagtctgcaagtggatattcagacctctttgaggccttcgttggaaacggtatttcttcatattatgctagacagaataattctcagtaacttccttgtgttgtgtgtattcaactcacagagttgaaggatcctttgcagagagcaggcttgaaacactctttttgtcgaatttgcaagtggagatttcagccgctttgaggtcaatggtagaataggaaatatcttcttatagaaactagacagaatgattctcagaaactcctttgtgatgtgtgagtacaactcacagagtttaacctttcttttcatagagcagttaggaaacactctgtttgtaaagtctgcaagtggatattcagacctctttgaggccttcgttggaaacgggtttttttcatgtaaggctagacagaagaattctcagtaacttccttgtgttgtgtgtattcaactgacagagttgaactttcatttagagagagcagatttgaaacactgtttttgtggaatttgcaagtggatatttcaagcgctttggggccaaaggcagaaaaggaaatatcttcgtataaaaactagacagaatcattctcagaaactgctctgtgatgtgtgcgttcaactctcagagtttaacttttcttttcattcagcagtttggaaacactctgtttgtaaagtctgcacgtggataatttgaccacttagaggccttcgttggaaacgggtttttttcatgtaaggctagacagaagaattcccagtaacttccttgtgttgtgtgcattcaactcacagagttgaacgttcccttagacagagcagatttgaaacactctatttgtgcaatttgcaagtgtagatttcaagcgcattaaggtcaatggcagaaaaggaaatatcttcgtttcaaaattagacagaaatcattcccacaaactgcgttgtgatgtgttcgttcaactcacagaagtttaacctttcttttcatagagcagttaggaaacagtctgtttgtaaattctgtaagtggatattctgacatcttgtggccttcgttggaaacgggatttcttcatattctgctagacagaacaattctcagtaacttccttttgttgtgtgctttcaactcacagagttgaacgatcctttacacagagcagattagaaacactctttttgtggaatttgcatgtggagatttcagccgctttgaggtcaatggtagaaaaggaaatatcttcgtataaaaactagacagaatgattctcagaaactcctttgtgatgtgtgtgttcaactcacagagtttaacctttcttttcatagagtagttaggaaacactctgtttgtaaagtctgcaattggatattcagacctcttagaggccttcgttggaaacgggatttcttcatattatgctagacagaagaattctcagtaacttccttgtgttgtgtgcattcatctcacagagttgaaagatcctttacacagagcagattagaaacaatatttttgtggattttgcaagtggagatttcagccactttgaggtcaatggtagaaaaggaaatatcttcgtataaaaactagagagaatcattctcagaaactgctctgcgatgtgtgcgttcaactctcagagtttaacttttcttttcattcagcagtttggaaacactctgtttgtaaagtctgcacgtggataacttgaccacttagaggccttcgttggaaacgggtttttttcctgtaaggctagacagaagaattcccagtaacttccttgtgttgtgtgcattcaactcacagagttgaacgttcccttagacagagcagatttgaaacactctatttgtccaatttgcaagtgtagatttcaagcgctttaaggtcaacggcagaaaaggaaatatcttcgtttcaaaactagacagaatcattcccacaaacttcgttgtgatgtgttcgttcaactcacagagtttaacgtttattttcatagagcagttaggaaacactctgtttgtaaactcttcaagtggatattcagacctctttgaggccttcgttggaaacgggatttcttcatattctgctagacagaagaattctcagtaacttccttgtgttgtgtgtattcaactcacagagttgaacgatcctttacacagagcacacttgaaacactctttttgtggaatttgcaagtggagatttcagccgctttgaggtcaatgggagaaaaggaaatatcttcgtataaagactagacagaatgattctcagaaactcctttgtgatgtgtgtgttcaactcacagagtttaacctttcttttcatagagcagttaggaaacactctgtaaagtctgaaagtggatattcagacctctttgaggccttcgttggaaacgggatttcttcatattctgctagacagaataattctcagtaacttccttgtgttgtgtgtattcaactgacagagttgaactttcatttagagagagcagatttgaaacactgtttgtgtggaatttgcaagtggagatttcaagcgctttggggccaaaggcagaaaaggtaatatcttcgtataaaaactagacagaatcattctcagaaactgctgcgtgatgtgtgcgttcaactctcagagtttaacttttcttttcattcagccgtttggaaacactctgtttgtaacgtctgcacgtggatattttgaccacttagaggccttcgttggaaacgggttttttgcatgtaaggctaaacagaagaattccccagtaacttccttgtgttgtgtgcattcaactcacagagttgaacgttcccttagacagagcagatttgaaacactctatttgtgcaatttgcaagtgtagatttcaagcgctttaaggtcaacggcagaaaaggaaatatcttcgtttcaaaactagacagaatcattcccacaaactgcgttgtgatgtgttcgttcaactcacagagtttaacctttcttttcatagagcagttaggaaacagtctgtttgtcaattctgtaagtggatattctgacatcttgtggccttcgttggaaacgggatttcttcatattctgctagacagaagaattctcagtaacttccttgtgttgtgtgtattcaactcacagagttgaacgatcctttacacagagcagacttgaaacactcttcttgtggaatttgcaagtggagatttcagtccgctttgaggtcaattgtagaataggaaatatcttcctatagaaactagacagaatgattctcagaaactcctttgtgatgtgtgcgttcaactcacagagtttaacctttcttttcatagagcagttaggaaacactctgtttgtaaagtctgcaagtggatattcagacctccttgaggccttcgttggaaacgggttttcttcatattatgctagacagaagaattctcagtaacttccttgtgttgtgtgtattcaactcacagagttgaacgatcctttacacagagcagacttgagacactctttttgtggaatttgcaagtggagatttcagccgctttgaggtcaatggtagaataggaaatatcttcctatagaaactagacagaatgattctcagaaactcctttgtgatgtgtgcgttcaactcacagagtttaacctttcttttcatagagcagttgggaaacactctgtttgtaaagtctgcaagtggatattcagacgtctttgaggccttcgttggaaacgggatttcttcatattctgctagacagaagaattcccagtaacttccttgtgttgtgtgcattcaacatcacagagttgaacgttcccttagacagagcagatttgaaacactatatttgtgcaatttgcaagtgtagatttcaagcgctttaaggtcaatggcgagaaaaggaaatatcttcgtttcaaaactagacagaatgattctcagaaactcctttgtgatgtgtgagttcaactcacagagtttaaccgttcttttcatagagcagttaggaaacactctgtttgtaaagtctgcaagtggatattcagacctctttgaggccttcgttggaaacgggatttcttcatattctgctagacagaagaattctcagtaacttccttgtgttgtgtgcattcaactcacagagttgaacgatcctttacacagggcagatttgaaacactctttttgtggaatttgcaagcggagatttcagcctctttgaggttaatggtagaaaatgaaatatcttcgtatagaaactagacagaatgattctcagaaactcctttgtgatgtgtgtgttcaactcacagagtttaacctttcttttcatagagcagtttggaaacactctgtttgtaaagtctgcaagtggatattcagacctctttgaggccttcgttggaaacgggtttttttcatataaggctagacagaagaattcccagtaacttccttgtgtgtgttcaactcacagagttgaactttcatttacacagagcagattggaaacactctttttgtggaatttgcaaagggagatttcaagagctttgaggccaaaggcagaaaaggaaatatcttcgtataaaaacgagacagaatcattctcagaaactgctgtgcgatgtgtgcgttcaactctcagagtttaacttttcttttcattcagcagtttggaaacactctgtttgtaaagtctgcacgtggataatttgaccacttagaggccttcgttggaaacgggtttttttcatgtaaggctagacagaagaattctcagtaacttccttgtgttgtgtgtattcaactcacagagttgaacgatcctttacacagagcagacttgaaacactctttttgtggaatttggaagtggagatttcagccgctttgagtgtcaatggtagaataggaaatatcttcctatagaaactagacagaatgattctcagaaactcctttgtgatgtgtgcgttcaactcacagagtttaacctttcttttcatagagcagttgggaaacactctgtttgtaaagtctgcatgtggatattcagacatccttgaggctttcgttggaaacgggatttcttcatattctgctagaaagaataattctcagtaacttccttgtgttgtgtgtattcaactcacagagttgaacgatcctttacagagagcagacttgaaacactctttttgtggaatttgcaagtggagatttcagccgctttgaggtcaaaggtagaataggaaatatcttcctacagaaactagacagaacgattctcagaaactcctttgtgatgtgtgcgttcaactcacagagtttaacctttcttttcatagagcagttaggaaacactctgtttgtaaagtctgcaagtggatattcagacctctttgaggtcttctttggaaacgggatttcttcctattctgctagacagaagaattcccagtaacttccttgtgttgtgtgtgttcaactcacagagttgaactttcatttacacagagcagatttgaaacactctttttgtggaatttgcaagtggagatttcaagcgctttgaggccaaggcacaaaaggatatatcttcgtataaaaactagacagaatcattctcagaaactgctctgcgatgtgtgcgttcaactctcagcagtttaacttttcttttcattcagcagtgtggaaacactctgtttgtaaagtctgcacgtggatattttgaccacttagaggccttcgttggaaacgggtttttttcctgtaaggctagacagaagaattcccagtaacttcccttgtgttgtgtacattcaactcacagagttgaacgttcccttagacagagctgatttgaaacactctttttgtgcaattggcaagtggagatttctagcgctttaaggtcaatggcagaaaaggaaatatcttcgtttcaaaactagacagaatcattcccacaaactgcgttgtgatgtgttcgttcaactcacaagagtttaacctttcttttcatagagcagttaggaaacagtctgtttgtcaattctgtaagtggatattctgacatcttgtggccttcgttggaaacgggatttcttcatattctgctagacagaagaattctcagaaacttccttgtgttgtgtgtattcaactcacagagtagaacgatcctttacacagagcagacttgaaacactctttttgtggaatttgcaagtggagatttcagccgatttgaagtcaatggtagaaagggaaatatcttcgtatagaaactagacagaatgattctcagaaaatcttttgtgtgtgtgcgttcaactcacagagtttaacttttcttctcatagagcagttaggaaacactctgtttgtaaagtgtgcaagtggatattcagacctctttgaggccttcgttggaaacgggatttcttcatattatgctagacagaagaattcccagtaacttccttgtgttgtgtgtgttcaactcacagagttgaacttccatttacacagagcagatttgaaacactctttttgtggaatttgcaagtggagatttcaagcgctttgaggccaaaggcagaaaaggaaatatcttcctttcaaaactagacagaatcattctcagaaactgctctgcgatgtgtgcgttcaactctcagagtttaacttttcttttcattcagcagtttggaaacactctgtttgtaaagtcagcacgtggataatttgaccacttagaggccttcgttggaaacgggtttttttcatgtaaggctagacagaagaattcccagtaacttccttgtgttgtgtgcattcaactcacagagttgaacgtttccttagacagagcagaattgaaacactctatttgtgcaatttgcaagtgtagatttcaagcgctttatggtcagtggcagaaaaggaaatatcttcgtttcaaaactagacagaatgattctcagaaactcctttgtgatgtgtgcgttcaactcacagagtttaacctttcttttcatagagcagttaggaaacactctgtttgtaaagactgcaagtggatattcagacctctttgaggccttcgttggaaacgggatttcttcatattctgctagacagaagaattctcagtaacttccttgtgttgtgtgtattcaactcacagagttgaacgatcctttacacagagcagacttgaaacattctttttgtggaatttgcaagtggagatttcagccgctttgacgtcaatggtagaataggaaatatcttcctatagaaactggacagaatgattctcagaaactcctttgtgatgtgtgggttcaactcacagagtttaacctttcttttcatagagcagttaggaaacactctgtttgtaaggtctgcaagtggatattcagacctctttgaggccttcgttggaaacgggattttttcatataaggctagacagagaattctcagtaacttccttgtgttgtgtgtattcaactgacagagttgaactttcatttagagagagcagatttgaaacactgtttttgtggaatttgcaagtggagatttcaagcgctttggggccaaaggcagaaaaggaaatatcttcgtataaaaactagacagaatctttctcagaaactgctctgcgatgtgtgcgttcaactctcagagtttaacttttcttttcattcagcagtttggaaacactctgtttgtaaagtctgcacgtggatattttgaccacttagaggccttcgtttgaaacgggtttttttcctgtaaggctagacagaagaattcccagtaacttccttgtgttgtgtacattcaactcacagagttgaacgttcccttagacagagcagatttgaaacactctttttgtgcaattggcaaatggagatttcaagcgctttaaggtcaatggcagaaaaggaaatattcttcgtttcaaaactagacagaatcattcccacaaactgcgttgtgatgtgttcgttcaacccacagagtttaacctttctgttcatagagcagttaggaaacactctgtttgtaaagtatgaaagtggatattctgacatcttgtggccttcgttggaaacgggatttcttcatattctgctagacagaagaattctcagtaacttccttgtgttgtgtgtattcaactcacagagttgaacgatcctttacacagagcagacttgaaacactctttttgtggaatttgcttgtggagatttcagccgctttgaggtcaatggtagaaaaggaaatatcttcgtataaagagtagacagaatgattctcataaactccttcgtgatgtgtgcgttcaactcacagagtttaacctttcttttcatagagcagttaggaaacactctgtttgtaaagtctgcaagtggatattcagacctctttgaggccttcgttttaaacgggatttcttcatattatgctagacagaagaattcccagtaacttccttgtgttgtgtgtgttcaactaatagagttgaactttcatttacacagagcagattggaaacactctttttgtggaatttgcaagtggagatttcaagcgctttgaggccaaaggcagaaaaggaaatatcttcttataaaaactagacagaatcattctcagaaactgctgcgtgatgtgtgcgttcaactctcagagtttaacttttcttttcattcagcggtttggaaacactctgtttttaaagtctgcacgtggaaattttgaccacttagaggccttcgttggaaacgggattttttcatgtaaggctagacagaagaattcccagtaactaccttgtgttgtgtacattcaactcacagagttgaacgttcccttagacagagcagatttgaagtactctttttgtgcaattggcaaatggagatttcaagcgctttaaggtcaatggcagaaaaggaaatatcttcgtttcaaaactagacagaatcattcccacaagctgcgttgtgatgtgttcgttcaactcacagagtttaacctttctgttcatagagcagttaggaaaccctctgtttgtaaagtctgcaagtggatattcagacctctttgaggctttcgttggaaacgggatttcctcaaattctgctagacagaagaattctcagtaacttccttgtgttgtgtgtattcaactcacagagttgaatgatcctttacacagagcagacttgaaacactctttttgtggaatttgcaagtggagatttcagccgctttgaggtcaatggtagaaaaggaaactgtcttcatataaagaatagacagaatgattctcagaaaatcttttgtgatgtgtgcgttcaacccacagagtttaacctttcttttcatagagcagttaggaaacactctgtttgaaaagtctgcaagtggatattcagacctctttgaggccttcgttggaaacgggatttcttcatattatgctagacagaagaattcccagtaactttccttgtgttgtgtgtgttcaactcacagagttgaactttcatttacacagagcagatttgaaacactctttttgtggaatttgcaagtggagatttcaagcgctgtgaggccaaaggcagaaaaggaaatatcttcgtataaaaactagacagaatcattctcagaaactgctctgcgatgtgtgcgttgaactctcagaagtttaacttttcttttcattcagcagtttggaaacactctgtttgtaaagtctgcacgtggataatttgaccacttagaggccttcgttggaaacgggtttttttcatgtaaggctagacagaagaattcccagtaacttccttgtgttgtgtgcattcaactcacagagttgaacgttcccttagacagagcagatttgaaacactctatttgtgcaatttgcaagtgtagatttcaagcgcattaaggtcaatggcagaaaaggaaatatcttcgtttcaaaattagacagaatcactcccacaaactgcgttgtgatgtgttcgttcaactcacagagtttaacctttcttttcatagagcagttaggaaacagtctgtttgaaaattctgtaagtggatattctgacatcttgtggccttcgttggaaacgggatttcttcatattctgctaggcagaataattctcagtaacttccttgtgttgtgtgtattcaactcacagagttgaaggatcctttacagagagcaggcttgaaacactctttttgtcgaatttgcaagtggagatttcagccgctttgaggtcaatggtagaaaagtaaatatcttcgtataaagactagacagaatgattctcagaaactcctttgtgatgtgtgcgttcaactcacagagttcaacctttcttttcatagagcagttgggaaacactctgtttgtaaagtctgcaagtggatattcagacttctttgagggcttcgttggaagcgggatttcttcatattctgctagacagaagaattcccagtaacttccatgtgttgtgtgtgttcaactcacagagttgaactttcatttacacagagcagatttgaaacactctttttgtggaatttgcaaatggagatttcaagcgctttgaggccaaaggcagaaaaggaaatatccttcgtataaaaactagacagaatcattctcagaaactgctctgcgatgtgtgcgttcaactctcagagtttaacttttcttttcattcagcagtttggaaacactctgtttgtaaactctgcacgtggataatttgaccacttagaggtcttcgttggaaacgggtttttttcatgtaacgctagacagaagaattcccagtaacttccttgtgttgtgtgcattcaactcacacagttgaacgttcccttagacagagcagatttgaaacactctatttgtgcaatttgcaagtgtagatttcaagcgctttaaggtcaatggcagaaaaggaaatatcttcgtttcaaaactagacagaatcattcccacaaactgcgttgtgatgtgttcgttcaactcacagagtttaacctttctgttcatagagcagttaggaaacactctgtttgtaaagtctgtaagtggatattctgatatcttgtggccttcgttggaaacgggatttcttcctattctgctagacagaagaattctcagtaacttccttgtgttgtgtgtattcaactcacagagttgaacgatcctttacacagagaagagttgaaacactctttttgtggaattggcaaggggagatttctgccgctttgagtcaatggtagaaaaggaaatatcttcgtataaagactagacagaatgattctcaggaactcctttgtgatgtgtgcgttcaactcacagagtttaacttttcttttcatagagcagttaggaaacactctgtttgtaaagtcttcaagtggatattcagacctctttgaggccttcgttggaaacgggatttcttcatattctgctagacagaagaattccaagtaacttccttgtgttgtgtgtgttcaactcacagagatgaactttcatttacacagagcagatttgaaacactctttttgtggaatttgcaagtggagatttcaagcgctttgaggccaaaggcagaaaaggaaatatcttcgtataaaaactagacagaaatcattctcagaacctgcttcgtgatgtgtgcgttcaactctcagagtttaacttttcttttcattcagcggtttggaaacactctgtttgtaaagtctgcacgtggaaattttgaccacttagaggccttcgttggaaacgggtttttttcatgtaaggctagacagaagaattcccagtaacttctttgtgttgtgtgcattcaactcacagagttgaacgttctcttagacagagcagatttgaaacactctatttgtgcaatttgcaagcgtagatttcaagcgctttaaggtcaatggcagaaaaggaaatatcttcgtttcaaaactagacagaaatgattcccacaaactgcgttgtgatgtgttcgttcaactcacagagtttaacctttctgttcatagagcagttaggaaacactctgtttgtaaagtctgtaagtggatattctgacatcttgtggccttcgttggaaacgggatttcttcatattatgctagacagaagaattctcagtaacttccttgtgttgtgtgtattcaactcacagagttgaacgatcctttacacagagcagtcttgaaacactctttttgtggaatttgcaagtggagatttcggccgctttgaggtcaacggtagaaaaggaaatatcttcgtataaagactagatagaatgattctcagaaactcctttgtgatgtgtgcgttcaactcacagagtttaacctttcttttcatagcgcagttgggaaacactctgtttgtaaagtctgcaagtggatattctgacatccttgaggctttcgttggaaacgggatttcttcatattctgctagaaagaagaattctcagtaacttccttgtgttgtgtgtattcaactgacagagttgaactttcatttagagtgagcagatttgaaacactgtttttgtggaatttgcaagtggagatttcaagcgctttggggccaaaggcagaaaaggaaatatcttcgtatataaactagacagaatcattctcagaaactgctctgcgatgtgtgcgttcaactctcagagtttaacttttcttttcattcagcagtttggaaacactctgtttgtaaagtctgcacgtggataacttgacctcttagaggccttcgttggaaacgggtttttttcctgtaaggctagacagaagaattcccagtaacttccttgtgttgtgtgcactcaactcacagagttgaacgttcccttagacagagcagatttgaaacactctatttgtgcaatttgcaagcgtagatttcaagcgctttaaggtcaatggcagaaaaggaaatatcttcgtttcaaaactagacagaatcattcccacaaactgcgttgtgatgtgttcgttcaactcacagagtttaacctttcttttcatagagcagttaggaaacattctgtttgtaaattctgtaagtggatattctgacatcttgtggccttcgttggaaacgggatttcttcatattctgctagacagaagaattctcagtaacttccttgtgttgtgtgttttcaactcagagagttgaacgatcctttacacagagcagacttgaaacactctttttgtggaatttgcaactggagatttcagccgcgttgatgtcaatggtagaaaaggaaatatcttcgtataaaaactggacagaatgattctcagaaactcctttgtgatgtgtgcgttcaactcacacagtttaacctttcttttcatagagaagttaggaaacactctgtttgtaaagtctgcaagtggatgttcagacctctttgaggccttcgttggaaacgggtttttttcatataaggctagacagaagaattcccagtaacttccttgtgttgtgtgtgttcaactcacagagttgaactttcatttacccagagcagatttgaaacactctttttgtggaatttgcaaatggagatttcagccgcgttgaggtcaatggtagaaaaggaaatatcttcgtttcaaaactagacagaatcattctcaggaactactgcgtgatgtgtgggttcaactctcagagtttaacttttcttttcattcagcggtttggaaacactctctttgtaaagtctgcacgtggaaattttgaccacttagaggccttcgtttgtttttttcatgtaaggctagacagaagaattcccagtaacttccttgtgttgtgtgtattcaactcacagagttgaacgatcctttacacagagcggacttgtaacactctttttgtggaatttgcaagtggagatttcagccgctttgaagtcaaagttagaaaaggaaataacttcctataaaaactagacagattcattcccacaaactgcgttgtgatgtgttcgttcaactcacagagtttaacctttcttttcatagagcagttaggaaacagtccgtttgaaaattctgtaagtggatattctgacatcttgtggccttcgttggaaacgagatttcttcatattctgctagacagaagaattctcagtaacttccttgtgttgtgtgtattgaactcacagagttgaacgatcctttacacagagcagacttgaaacactctatttgtagaatttgcaagtggagatttcagccgctttgaggtcagtagtagaaaaggaaatatcttcgtggaaaaactagacagaatgattctcagaaactcctttgtgatgtgtgcgttcaacacacagagtttaacttttcttttcatagagcagttagtaaacactctgtttataaagtctgcaagtggatattcagacccctttgaggccttcgttggaaacgggatttcttcatattatgctagacagaagaattctcagaatcttccttgtgttgtgtgtattcaactcacagagttgaacgatcctttacacagagcagacttgaaacactctttttgtggaatttgcaagtggagatttcaagcgctttgaggccaaaggcagaaaaggaaatatcttcgtagaaaaactagacagaatcattctcagaaactgctctgcgatgtgtgcgttcaactctcagagtttaacttttcttttcattcagcagtttggaaacactctgtttgtaaagtctgcacgtggataatttgaccacttagaggtcttcgttggaaacgggttttttcatgtaaggctagacagaagaattcccagtaacttcccttgtgttgtgtacattcaactcacagagttgaacgttcccttagacagagcatatttgaaacactctttttgtgcaattggcaagtggagatttcaagcgctttaaggtcaatgggagaaaaggaaatatcttcgtttcaaaactagacagaatcttcccacaaactgcgttgtgatgtgttcgttcaactcacagagtttaacctttcttttcatagagcagttaggaaacagtctgtttgtcaattctgtaagtggatattctgacatcttgtggccttcgttggaaacgggatttcttcatattctcctagacagaagaattctcagtaacttccttgtgttgtgtgtattcaactcacagagttgaacgatcctttacacagagcagacttgaaacactctttttgtggaatttgcaagtggagatttcagccgctttgaggtcaatggtagaaaaggagacatcttcgtataaaaactagacagaatgattcttagaaactcctttgtgatgtgtgcgttcaactcacagagtttaccctttcttttcatagagcagttaggaaacactctgtttgtaaagtctgcaagtggatattcagacatccttgaggctttcgttggaaacgggatttcttcatattctgccagaaagaagaattcccagtaacttccttgtgttgtgtgtgttcaactcacagagttgaactttcatttacacagagcagatttgaaacactctttttgtggaatttgcaagtggagatttcaagcgctttgaggtcaatggtagaaaaggaaatatcttcgtataaaaactagacagaatcattctcagaaactgctctgcgatgtgttcgttcaactctaagagtttaacttttcttttcattcagcagtttggaaacactctgtttgtaaagtctgtacgtggataatttgaccacttagaggccttcgttggaaacgggtttttttcatgtaaggatagacagaagatttctcagtaacttccttgtgttgtgtgtattcaactcacagagttgaacgatcctttacacagagcagacttgtatcactctttttgtggaatttgcaagtggagatttcagccgctttgaagtcaaaggtagaaaaggaaatatcttcctataaaaactagacagaatgattctcagaaacttctttgtgatgtgtgcgttcaactcacagagtttaacctttcttttcatagagcagttaggaaacactgtgtttttaaactctgcaagtggatattcagacctctttgaggccttcgttggaaacgggatttcttcttactgtgctagacagaagaattctcagtaacttccttgtgttgtgtgtattcaactcacagagttgaccgatcctttacacagagcagacttgtaacactctttttgtggaatttgcaagtggagatttcagccgctttgaagtcaaaggtagaaaagggaatatcttcctataaaaactagacagaatgattctcagaaactcctttgtgatgtgtgcgttcaactcacagagtttaacctttcttttcatagagcagttaggaaacactctgtttgtaaagtctgcaagtggatattcagacctctctgaggccttcgttggaaacgggatttcttcatactgtgctagacagaagaattcccagtaacttccttgtgttgtgtgtgttcaactcacagagttgaactttcatttacccagagcagatttgaaacactctttttgtggaatttgcaagtggagatttcaagcgttttgaggccaaaggcagaaaaggaaatgtcttcgtttcaaaactagacagaatcattctcagaaactgctctgcgatgtgtgcgttcaactctcagagtttaacttttcttttcattcagcagtttggaaacactctgtttgtaaagtctgcacgtggatattttgaccatttagaggccttcgttggaaacgggtttttttcttgtaaggctagacagaagaattctcagtaactcccttgtgttgtgtgtattcaactcacagagttgaacgatcctttacagagagcagacttgaaacactctttttgtggaatttgcaagtggagatttcagccgctttgaggtcaatggtagaataggaaatatcttcctatagaaactagacagaatgattctcagaaattcctttgtgatgtgtgcgttcaactcacagagtttaacctttcttttcactagagcagttaggaaacactctgtttgtaaagtctgcaagtggatattcagacctctttgaggccttcgttggaaacgggatttcttcatattctgctagacagaagaattctcagtaacttccttgtgttgtgtgtattcaactcacagagttgaacgatcctttacacagagcagacttgaaacactctttttgtggaatttgcaagtggagatttcagccgctttgaggtcaatagtagaaaaggaaatatcttcgtagaaaaactaggcagaatgattctcagaaactcctttgtgatgtgtgcgttcaagtcacagagtttaacctttcttttcatcgagcagttaggaaacactctgtttgtaaagtctgcaagtggatattcagacatccttgaggctttcgttggaaacgggatttcttcatattctgctagaaagaagaattcccagtaacttccttgtgttgtgtgtgttcaactgacagagttgaactttcatttacccagagcagatttgaaacactctttttgtggaatttgcaagtggagatttcaagcgctttgaggccaaaggcagaaaaggaaatatcttcgtttcaaaactagacagaatcattctcagaaactgctgcgtgatgtgtgcgtccaacactcagagtttaacttttcttttcattcagcggtttggaaacactctgtttgtaaagtctgcacgtggatattttgaccacttagaggccttcgttggaaacgggtttttttcatgtaaggctagacagaaggaattcccagtaacttccttgtgttgtgtacattcaactcacagatttgaacgttcccttagacagagcagatttgaaacactctttttgtgcaattggcaaatggagatttcaagcgctttaaggtcaatggcagaaaaggaaatatcttcgtttcaaaactagacagaatcattcccacaaactgcgttgtgatgtgttcgttcaactcacagagtttaacctttctgttaatagagcagttaggaaacactctgtttgtaaagtttgcaagtggatattcagacctccttgaggccttcgttggaaacgggatttcttcatattctgctagacagaagaattctcagaatcttccttgtgttgtgtgtattcaactcacagagttgaacgatcctttacacagagcagacttgaaacactctttttgtggaatttgcaagtggagatttcagccgctttgaggtccatggtagaaaaggaaatgtcttcgtataaaaactagacagaatgattctcagaaacttctttgtgatgtgtgcgttcaactcacagagtttaacctttcttttcatagagcagttaggaaacactctgtttgtaaattctgcaagtggatattcagacctctttgaggccttcgttggaaacgggatttcttcatactatgctagacagaagaattcccagtaacttccttgtgttgtgtgtgttcaactcacagatttgaactttcatttacacagagcagatttgaaacactctttttgtggaatttgcaagtggagatttcaagcgctttgaggccaaaggcagaaaaggaaatatcttcgtataaaaactagacagaatcattctcagaaactgctgcgtgatgtgtgcgttcaactctcagcgtttaacttttcttttcattcagcggtttggaaacactctgtttgtaaagtctgcacgtggatattttgaccacttagaggccttcgttggaaacgggtttttttcatgtaaggctagacagaagaattcccagtaacttccttgtgttgtgtgcattcaactcacagagttgaacgttcccttagacagagcagatttgaaacactctatttgtgcaatttgcaagtgtagttttcaagctctttaaggtcaacggcagaaaaggaaatatcttggtttcaaaactagacagaatgattctcagagaatcttttgtgatgtgtgcgttcaactcacagagtttaacttttcttctcatagagcagttaggaaacactctgtttgtaaagtctgcaagtggatattcagacctctttgaggtcttcgttggaaacgggatttcttcatattatgctagacagaataattctcagtaacttccttgtgttgtgtgtattcaactcacagagttgaaggatcctttacagagagcaggcttgaaacactctttttgtcgaatttgcaagtggagatttcagccgctttgaggtcaaaggtagaataggaaatatcttcttatagaaactagacacaatgattctcagaaacttctttgtgatgtgtgcgttcaactcacagagtttaacctttcttttcatagagcagttaggaaacactctgttggtaaactctgcaagtggatattcagacctctttgaggccttcgttggaaacgggatttcttcatactatgctagacagaagaattcccagtaacttccttgtgttgtgtgtgttcaactcacagagttgaactttcatttacacagggcagatttgaaacactctttttgtggaatttgcaaatggaggtttcaagcgctttgaggccaaaggcagaaaaggaaatatcttcgtataaaaactagacagaatcattctcagaaactgctctgcgatgtgtgcgttcaactctcagagtttaacttttcttttcattcagcagtttggaaacactctgtttgtaaagtctgcacgtggataatttgaccacttagaggccttctttggaaacgggtttttttcatataaggctagacagaagaattcccagtaacttccttttgttgtgtgtgttcaagtcacacagatgaactctcatttacacagagcagatttgaaactctctttttgtggaatttgcaaatggagatttcaagcgctttgaggccaaaggcagaaaaggaaatatcttcctataaaaactagacagaatcattctcagaaactgctctgcgatgtgtgcgttcaactctcagagtttaacttttcttttcattcagcagtttggaaacactctgtttgtaaagtctgcacgtggataacttgaccacttagaggccttcgttggaaacgggtttttttaacgtaaggctagacagaagaatttcccagtaacttccttgtgttgtgtgcattcaactcacagagttgaacgttcccttagacagagcagatttgaaacactctatttgtgcaatttgcaagtgtagatttcaagcgctttaaggtcaatggcagaaaaggaaatatcttcgtttcaaaactagacagaatcattcccacaagctgcgttgtgatgtgttcgttcaactcacagagtttaacctttctgttcatagagcagttaggaaacacgctgtttgtaaagtctgtaagtggatattctgacatcttgtggccttcgttgcaaacgggatttcttcatattctgctagacagaagaattctcagtaactaccttgtgttctgtgtattcaactcacagagttgaacgatcctttacacagagcagacttgaaacactctttttgtggaatttgcaagtggagatttcagccattttgaggtcaatggtagaaaaggaaatatcttcgtagaaaaactagacagaatgattctcagaaactgctttgtgatgtgtgcgttcaactcacagagttcaacctttcttttcatagagcagttaggaaacactctgtttgtaaagtctgcaagtggatattcagacctctttgaggccttcgttggaaacgggatttcttcatattatgctagacagaagaattcccagtaacttccttgtgttgtgtatgttgaactcacagagttgaactttcatttacacagagcagatttgaaacactctttttgtggaatttgcaaatggagatttcaagcactttgaggccaaaggcagaaaaggaaatatcttcatataaaaactagacagaatcattctcagaaactgctctgcgatgtgtgcgttcaactctcagagtttaacttttcttttcattcagcagtttggaaacactctgtttgtaaagtctgcacgtggataatttgatcacgtagaggccttcgatggaaacggttttttttcatgtaaggctagacagaagaattcccagtaacttccttgtgttgtgtacattcaactcacagagttgaacgttcccttagacagagcagatttgaaacactctttttgtgcaattggcaagtggagatttcaagcgctttaaggtcaatggcaaaaaaggaaatatcttcgtttcaaaactagacagaatcattcccacaaactgcgttgtgatgtgttcgttcaactcacagagtttaacctttcttttcatagagcagttaggaaacactctgtttgtgaactctgcaagtggatattctgacatcttgtggcctttgttggaaacgggatttcttcatattctgctagacagaagaattctcagtaacttccttgtgttgtgtgtattcaactcacagagttgaacgatcctttacacagagcagacttgaaacactctttttgtggaatttgcaagtggagatttcagccactttgagttcaatggtagaataggaaatatcttcctatagaaactagacagaatgattctcagaaactcctttgtgatgtgtgcgttcaactcacagagttcaacctttcttttcatagagcagttgggaaacactctgtttgtaaagtctgcaagtggatattcagacttctttgaggccttcgttggaagcaggatttcttcatattctgctagacagaagaattcccagtaacttccttgtgttgtgtgtcttcaactcacagagttgaactttcatttacacagagcagatttgaaacactctttttgtggaatttgcaaatggagatttcaagcgctttgaggccaaaggcagaaaaggaaatatcttcggtataaaaacttgacagaatcattctcagaaactgctctgcgatgtgtgcgttcaactctcagagtttaacttttcttttcattcagcagtttgaaaacactctgtttgtaaagtctgcacgtggataatttgactacttagaggccttcgttggacacgggtttttttcatgtaaggctagacagaagaattcccagtaacttccttgtgttctgtgcattcaactcacagagttgaacgttccctcagacagagcagatttgaaacactctatttgtgcaatttgcaagtgtagatttcaagcgctttaaggtcaacggcagaaaaggaaatatcttcgtttcaaaactagacagaatgattctcagaaactcctttgtgatgtgtgcgttcaactcacagagtttaacctttcttttcatagagcagttaggaaacactctgtttgtaaagtctgcaagtggatattcagacatctttgaggccttcattggaaacgggatttcttcatgttctggtagacacaagaattctcagaaacttccttgtgttgtgtgttttcaactcacagagttgaacgatgctttacacagagtagacttgaaacactctttttgtgtaatttgcaagtggagatttcagccgctttgaagtcaatggtagaaaaggaaatatcttcgtataaaaactagacagaatgattctcagaaactcctttgtgatgtgtgcgttcaactcacagagtttaacctttcttttcatagagcagttaggaaacactctgtttgtaaagtctgcaagtggatattcagacctctttgaggccttcgttggaaaggggatttcttcatattctgctagagagaagaattcccagtaacttccttgtgttgtgtgtgttcaactcacagagttgaactttgatttacacagagcagatttgaaacactctttttgtggaatttgcaagtggggatttcaagcgctttgaggccaaaggcagaaaaggaaatatcttcgtataaaaactagacagaatcattctcagaaactgctctgtgatgtgtgcgttcaactctcagagttgaacttttcttttcattcagcagtttggaaacactctgtttgtaaagtctgcacgtggatattttgaccacttagaggcgttagttggaaacgcgtttttttcatgtaaggctagacagaagaattcccagtaacttccttttgttgtgtgcattcaactcacagagttgaacgttcccttagacagagcagatttgaaacactgtttttgtgcaatttgcaagtggagatttcaagcgctttaaggtcaatggcagaaaaggaaatatcttcgtttcaaaactagacagaatcattcccacaaactgcgttgtgatgtgttcgttcaactcacagagtttaacctttcttttcatagagcagttaggaaacagtctgtttgtgaattctgtaagtggatattctgacatcttgtggccttcgttggaaatgggatttcttcatattctgctagacagaagaattctcagtaacttccttgtgttgtgtgtattcaactcacagagttgaacgatcatttacacagagcagacttgtaacactctttttgtggaatttgcaagtggagatttcagccgctttgaagtcaaaggtagaaaaggaaatatcttcctataaaaactagacagaatgattctcagaaactcctttgtgatgtgtgcgttcaactcacagagttcaacctttcttttcatagagcagtttggaaacactctgtttgtaaagtctgcaagtggatattcagacttctttgaggccttcgttggaagcgggatttcttcatattctgctagacagaagaattctcagtaactgccttgtgttgtgtgtattcaactcacagagttgaacgatcctttacacagagcagacttgaaacactctttttgtggaatttgcaagtggagatttcagccgctttgaggtcaatggtagaataggaaatttcttcctatagaaactagacagaatcattctcagaaactgctctgcgatgtgtgcgttcaactctcagagtttaacttttcttttcattcagcagtttggaaacactctgtttgtaaagtctgcacgtggataacttgaccacttagaggccttcgttggaaacgggtttttttcatgtaaggctagacagaagaattcccagtaacttccttgtgttgtgtgcattcaactcacagagttgaacgttcccttagacagagcagatttgaaacactctatttgtgcaatttgtaagtgtagatttcaagcgctttaaggtcaatggcagaaaaggaaatatcttcgtttcaaaactagacagaatcattcccacaaactgcgttgtgatgtgttcgttcaactcacagagtttaacctttctgttcatagagcagttaggaaacactctgtttgtaaagtctgtaagtggatattctgacatcttgtggcccttcgttggaaactggatttctccatattctactagacagaataattctcagtaacttccttgtgttgtgtgtattcaactctcagagttgaacgatccttctacagagagcagacttgaaacactctttttgtggaatttgcaagtggagatttcagccgctttgaggtcaatagtagaaaaggaaatatcttcgtagaaaaactagacagaatgattctcagaatctcctttgtgatgtgtgcgttcaactcacagagtttaacctttcttttcatagagcagttaggaaacactctgtttgtaaagtctgcaagtggatattcagacctctttgaggccttcgttggaaacgggttttttcatataaggctagacagaagaattcccagtaacttccttgtgttgtgtgtgttcaactcacagagttgaactttcatttacacagagcagatttgaaacactctttttgtggaatttgcaattggagatgtcaagcgctttgaggccaaaggcagaaaaggaaatatcttcgtttcaaaactagacagaatcattctcagaaactgctgcatgatgtgtgcgttcaactctcagagtttaacttttcttttcattcagcggtttggaaacactctgtttgtaaagtctgcacgtggatattttgaccacttagaggccttcgttggaaacgggtttttttcatgtaaggctagacagaagaattcccagtaacttccttgtgttgtgtgcattcaactcacagagttgaacgttcctttagacagagcagatttgaaacactctatttgtgcaatttgcaagtgtagatttcaagcgctttaaggtcaacggcagaaaaggaaatatcttcgtttcaaaactagacagaatgattctcagaaactcctttgtgatgtgtgcgttcaactcagagagttcaacctttcttttcatagagcagttgggaaacactctgtttgtaaagtctgcaagtggatattcagacttctttgaggccttcgttggaagcgggatttcttcatgttctgctagacagaagaattctcagaaacttccttgtgttgtgtgttttcaactcacagagttgaacgatcctttacacagagcagacttgaaacactccttttgtggaatttgcaagtggagatttcagccggtttgaggtcaatggtagaataggaaatatcttcctatagaaagtagacagaatgattctcagaaactcctttgtgatgtgtgcgttcaactcacagagtttaacctttcttttcatagagcagttaggaaacactctgtttgtaaagtctgcaagtggatattcagacctccttgaggccttcgttggaaacgggatttcttcatattttgctagacagaagaattctcagtaacttccttgtgttgtgtgtattcaactcacagagttgaacgatcctttacacagagaagacttgaaacactctttttgtggaatttgcaagtggagatttcagccgctgtgagttcaatggtagaataggaaatatcttcctatagaaactagacagaatcattctcagaaactgctctgcgatgtgtgcgttcaactctcagggtttaacttttcttttcattcagcagtttggaaacactctgtttgtaaagtctgcacgtggataatttgaccacttagaggtcttcgttggaaacgggtttttttcatgtaaggctagacagaagaattcccagtaacttccttgtgttgtgtgcattcaactcacagagttgaacgttcccttagacatagcagatttgaaacactctctttgtgcaatttgcaagtgtagatttcaagcgctttaaggtcaacggcagaaaaggaaatatcttcgtttcaaaactagacagaatgattctcagaaactcctttgtgatgtgtgcgttcaactcacagagtttaacctttcttttcatagagcagttaggaaacactctgtatgtaaagtctgcaagtggatattcagacctccttgaggccttcgttggaaatgggatttcttcatattctgctagacagaagaattctcactaacttccttgtgttgtgtgtattcaactcacagagttgaacgatcctttacacagagcagacttgaaacactctttttgtggaatttgcaagtggagatttcagccgctttgaggtcaatggtagaaaaggaaatatcttcgtataaagactagacagaatgattctcagaaactcctttgtgatgtgtgcgttcaactcacagagtttaacctttctttccatagagcagttaggaaacactctgtttgtaaagtctgcaggtggatattcagacctccttgaggccttcgttggaaacgggatttcttcatattatgctagacagaagaattctcagtaacttccttgtgttgtgtgtattcaactcacagagttgaactttcatttggagagagcagatttgaaacactgtttttgtggaatttgcaagtggagatttcaagcgctttggggccaaaggcagaaaaggaaatatcttcgtataaaaactagacagaatgattctcagaaactcctttgtgatgtgtgcgttcaactcacagagtttaacctttcatttcatagagcagttaggaaacactctgtttgtaaagtctgcaagtggatattcagacatccttgaggctttcgttggaaacgggatttcttcatattctgctagaaagaagaattctcagtaacttccttgtgttgtgtgtattcaactcacagatttgaacgatcgtttacacagagcagacttgagacactctttttgtggaatttgtaagtggagatttcagccgctttgaggtcaatggtagaaaaggaaatatcttcatataaaaactagacagaatgattctcagaaactcctttgtgatgtgtgcgttcaactcacagagtttaacctttcttttcatagagcagttaggaaacactctgtttgtaaagtctgcaagtgaatattcagacctctttgaggccttcgttggaaacgggatttcttcatattaagctagacagaagaattctcaataacttccttgtgttgtgtgtattcaactcacagagttgaacgatcctttacacagagcagacttgaaacactctttttgtggaatttgcaagtggagatttcagccgctttgaggtcaatggtagaataggaaatatcttcctatagaaagtagacagaatgattctcagaaactcctttgtgatgtgtgcgttcagctcacagagtttaacctttcttttcatagagcagttaggaaacactgtgtttgtaaagtctgcaagtggatattcagacctccttgaggccttcgttggaaacgggatttcttcatattatgctagacagaagaattctcagtaacttccttctattctgtgtattcaactcacagagttgaacgatcctttacacagagcagacttgaaacgctcttttggtggaattggcaagtggagaattcagccgctttgagatcaatggtagaataggaaatatattcctatggaaactagagagaatgattctcagaaactcctttgtgatgtgtgcgttcaactcacagagtttaacctttcttttcatagagcagttaggaaacactctgtttgtaaagtctgcaagtggatactcagacctctttgaggccttcgttggaaacgggatttcttcatattatgctagacagaagaattcccagtaacttccttgcgttgtgtacattcaactcacagagttgaacgttcccttagacagagcagatttgaaacactctttttgtgcaattggcaagtggagatttcaagcgctttaaggtcaatggcagaaaaggaaatatcttcgtttcaaaactagacagaatcattcccacaaactgcgttgtgatgtgttcgttcaactcacagagtttaacctttctgttcatagagcagttaggaaacactctgtttgtaaagtctgcaagtggatattcagacctctttgaggccttcgttggaaacgggatttcttcatattatgctacacagaggaattctcaggaacttccttgtgttgtgtgtattcaactcacagagttgaacgatcctttacacagagcagacttgaaacactctttttgtggaatttgcaagtggagatttcagccgctttgagttcaaaggtagaataggaaatatcttcctatagaaagtacacagaatgattctcagaaacttctttgtgatgtgtgcgttcaactcacagagtttaacctttcttttcatagagcagttaggaaacactctgtttgtaaactctgcaagtcgatattcagacctctttgaggccttagttggaaacgggatttcttcatactatgctagacagaagaattctcagtaacttccttgtgttgtgtgtattcaactgacagagttgaactttcatttagagagagcagatttgtaacactgtttttgtggaatttgcaagtggagatttcaagagctttggggccaaaggcagaaaaggaaatatcttcgtataaaaactagacagaatcattctcagaaactgctctgcgatgtgtgcgttcaactctcagagtttaactttgcttttcattcagcagtttggaaacactctgtttgtaaagtctgcacgtggataatttgaccacttagaggccttcgttggaaacgggtttttttcatgtaaggctagacagaagaattcccagtaacttccttgtgttgtgtgcattcaactcacagagttgaacgttcccttagacagagcagatttgaaacactctatttgtgcaatttgcaagtgtagatttgaagcgctttaaggtcaatggcagaaaaggaaatatcttagtttcaaaactagacagaatcattcccacaaactgctttgtgatgtgttcgttcaactcacagagtttaagctttctgttcatagagcagttaggaaacactctgtttgtaaagtctgcaagtggatattcagacctccttgaggccttcgttggaaacgggatttcttcatattctgctagacagaagaattctcagtaacttccttgtgttgtgtgtattcaactcacagagttgaacgatcctttacatagagcagacttgtaacactctttttgtggaatttgcaagtggagatttcagccgctttgaagtcaaaggtagaaaaggaaatatcttcctataaaaactagacagaatgattctcagaaactcctttgtgatgtgtgcgttcaactcacacagtttaacctttcttttcatagagcagttaggaaacactctgtttgtaaagtctgcaagtggatattcagacctcccttgaggtcttcgttggaaacgggatttcttcatattatgctagacagaagaattcccagtaacttccttgtgttgtgtgtgttcaactcacagagttgaactttcatttacacagagcagatttgaaacactctttttgtataatttgcaaatggagatttcaagcgctttgaggccaaaggcagaaaaggaaatatcttcttataaaaactagacagaatcattctcagaaactgctctgcgatgtgtgcgttcaactctcagagtttaacttttcttttcattcagcagtttggaaacactctggttgtaaagtctgcacgtggatattttgaccacttagaggccttcgttggaaacgggtttttttcctgtaaggctagacagaagaattcccagtaacttccttgtgttgtgtacattcaactcacagagttgaacgttcccttagacagagcagatttgaaacactctttttgtgcaactggcaaatggagatttcaagcgctttaaggtcaatggcagaaaaggaaatatcttcgtttcaaaactagacagaatgattctcataaactcctttgtgatgtgtgcgttcaacacacagagtttaacctttctgttcatagagcagttaggaaacactctgtttgtaaagtctgtaagtggatattctgacatcttgtggccttcgttggaaacgggttttcttcatattctgctagacagaagaattctcagtaacttccttgtgttgtgtgtattcaactcacagagttgaacgatcctttacacagaggagacttgtaacactctttttgtggaatttgcaagtggagatttcagccgctttgaagtcaaaggtagaaaaggaaatatcttcctataaaaactagacagaatgattctgagaaactcctttgtgatgtgtgcgttcaactcacagagtttaacctttcttttcatagagcagttaggaaacactctgtttgtaatgtgtgcaagtggatattcagacctccttgaggccttcgttggaaacgggatttcttcatattatgctagacaaaagaattctcagtaacttccttgtgttgtgtgtattcaactcacagagttgaacgatcctttacacagagcagactggaaacactctttttgtggaatttgcaagtggagatttcagccgctttgaggtcaatggtagaataggaaatatcttcctatagaaactagacagaatcattctcagaaactgctgtgtgatgtgtgcgttcaactctcagagtttaacttttcttttcattcagcggtttggaaacactctgtttgtaaagtctgcacgtggaaattttgaccacttagaggccttcgtggaaacgggtttttttcatgtaaggctagacagaagaattaccagtaacttccttgtgttgtgtgcattcaactcacagagttgaacgttcccttagacagagcagatttgaaacactctatttgtgcaatttgcaagtgtagatttcaagcgctttaaggtcaatggcagaaaaggaaatatcttcgttttaaaactagacagaatcattcccacaaactgcgttgtgatgtgttcgttcaactcacagagtttaacctttcttttcatagagcagttaggaaacagtctgtttgtaaattctgtaagtggatattctgacatccttgtggccttcgttggaaacgggatttcttcatattctgctagacagaagaattctcagaatcttccttgtgttgtgtgtattcaactcacagagttgaacgatggtttacacagagcagatttgaaacactctttttgtggaatttgcaagtggagatttcagccgctttgaggtcaatggtagaaaaggaaatatcttcatataaaaactagacagaatgattctcagaaactcctttgtgatgtgtgcgttcaactcacagagtttaacctttcttttcatagagcagttaggaaacactctgtttgtaaagtctgcaagtggatattccgacctccttgaggccttctttggaaacgggatttcttcatattatgctagacagaagaattcccagtaacttccttgtgttgtgtgtgttcaactcacagagttgaactttcatttacacagagcagatttgaaacactctttttgtggcatttgcaagtggagatttcaagcgctttgaggccaaaggcagaaaaggaaatatcttcgtttcaaaactagacagaatcactctcagaaactgctctgcgatgtgtgcgttcaactctcagagtttaacttttcttttcattcagcagtttggaaacactctgtttgtaaagtctgcacgtggatattttgaccacttagaggccttcgttggaaacgggtttttttcctgtaaggctagacagaagaattgtcagaatcttccttgtgttgtgtgtattcaacacacagagttgaatgatggtttacacagagcagatttgaaacactcttttggtggaatttgcaagtggagatttcagccgctttgaggtcaatggtagaaaaggaattatcttcgtttcaaaactagacagaatcattctcacaaactgcgttgtgatgtgttcgttcaactcacagagtttaacctttctgttcatagagcagttaggaaacactctgtttgtaaagtctgtaagtggatattctgacatcttgtggccttcattggaaacgggatttcttcatattctgctagacagaagaattctcagtaacttccttgtgttgtgtgtattcaactcacagtagttgaacgatcctttacacagagcatacttgaaacactcttgttgtggaatttgcaagtggagatttcagccactttgaggtcaatggtagaaaaggaaatatcttcgtataaaaactagacagaatgattctcagaaactcttttgtgatgtgtgcgttcaactcacagagtttaacctttctgttcatagagccgttaggaaacactctgtttgtaaagtctgcaagtggatattcacacctccttgtgaccttcgttggaaacgggatttcttcatattctgctagacagaagaattctcagtaacttccttgtgttgtgtgtattcaactgacagagttgaactttcatttagagagagcagatttgaaacactgtttttgtggaatttgcaagtggagatttcaagcgctttggggccaaaggcagaaaaggaaatatcttcctatgaaaactagacagaatcattctcagaaactgctgtgtgatgtgtgcgttcaactctcacagtttaacttttcttttcattcagccgtttggaaacactctgtttgtaaagtctgcacgtggatattttgaccacttaaaggccttcgttggaaacgggtttttttcatgtaaggctagacagaagaattcccagtaacttccttgtgttctgtgcattcaactcacagagttgaacgttcccttagacagagcagatttgaaacactctatttgtgcaatttgcaagtgtagatttcaagcgctttaaggtcaataacagaaaaggaaatatcttcgtttcaaaactagacagaatcattctcacaaactgcgttgtgatgagttcgttcaactcacagagtttaacctttctgttcatagagcagttaggaaacactctgtttgtaatgtctgtaagtggatattctgacatcttgtggccttcgttggaaacgggatttcttcatattctgctagacagaagaattctcagtaacttccttgtgttgtgtgtattcaactcacagagttgaacgatcctttacacagagcagtcttgaaacactctttttgtggaatttgcaagtggagatttcagccgttttgaggtcaatggtagaaaaggaaatatcttcgtataaagactagacagaatgattctcagaaactcctttgtgatgtgggtgttcaactcacagagttaacctttcttttcatagagcagttaggaaacactctgtttgtaaagtctgcaagtggatattttcacctctttgaggccttcattggaaacgggttttttttcatgtaaggctagacagaagaattctcagtaccttccttgtgttgtgtgtattcaactgacagagttgaactttcatttagacagagcagatttgaaacactctttttctggaatttgcaagtggagatttcaagcgctttgaggccaaaggcagaaaaggaaatatcttcgtataaaaactagacagaatcattctcagaaattgctgcgtgatgtgtgcgttcaactctcagagtttaacttttcttttcattcagcggtttggaaacactctgtttgtaaagtctgcacgtggatattttgaccacttagaggccttcgttggaaacgggtttttttcatgtaaggctagacagaagaattcccagtaacttccttgtgttgtgtgcattcaactcacagagttgaacgttcccttagacagagcagatttgaaacactctatttgtgcaatttgcaagtgtagatttcaagcgcattaaggtcaatggcagaaaaggaaatatcttcgtttcaaaattagacagaatcattccacaaactgcgttgtgatgtgttcgttcaactcacagagtttaacctttctgttcatagagcagttaggaaacactctgtaaagtctgtaagtggatattctgacatcttgtggccttcgttgtaaacgggatttcttcatattctgctagacagaagaattctcagaatcttccttgtgttgtgtgtattcaactcacacagttgaacgattgtttacacagagcagatttgaaacactctttctgtggaatttgcacgtggagatttcagccgctttgaggtcaatggtagaaaaggaaatatacttcgtataaaaactagacagagtgattctcagaaactcctttgtgatgtctgcgttcaactcacagagtttaacctttcttttcatagagcagttaggaaacactctgtttgtaaagtctgcaagtggatattcagacatccttgaggctttcgttggaaacgggatttcttcatattctgctatacagaagaattctcagtaacttcccttgtgttgtgtgtattcaactgacagagttgaactatcatttagagagagcagatttgaaacactgttttgtggaatttgcaagtggagatttcaagcgctttggggccaaaggcagaaaaggaaatatcttcgtataaaaactagacagagtcattctcagaaactgctgcgtgatgtgtgtgttcaactctcagagtttaacttttcttttcattcagcggtttggaaacacgctgtttgtaaagtctgcacgtggatattttgaccacttagaggccttcgttggaaacgggtctttatcatgtaaggctagacagaagaattcccagtaacttccttgtgttgtgtacattcaactcacagagttgaacgttcccttagacagagcagatttgaaacactctttttgtgcaattgggaaatggagatttcaagcgctttaaggtcaatggcagaaaaggaaatatcttcgtttcaaaactagacagaatcattcccacaaactgcgttgtgatgtgttcgttcaactcacagagtttaacctttctgttcatagagcagttaggaaacactctgtttgtaaagtctgtaagtggatattctgacatcttgtggccttcgttggatacgggatttcttcatattctgctagacagaagaattctcagtaacttccttgtgttgtgtgtattcaactcacagagttgaacgatcctttacacagagcagacttgtaacactctttttgtggaatttgcaagtggagatttcagccgctttgaagtcaaaggcagaaaaggaaatgtcttcgtttcaaaactagacagaatgattctcagaaactcctttgtgatgagtgcgttcaactcacagagtttaacctttcttttcatagagcagttaggaaacactctgtttgtaaagtgtgcaagtggatattcagacctctttgaggccttcgttggaaacgggatttcttcatattctgctagacagaggaattctcaggaacttccttgtgttgtgtgttttcaactcacagagttgaacgatcctttacacagagcagacttgaaacactccttttgtggaatttgcaagtggagatttcagccgctttgaggtcaatggtagaataggaaatatcttcctatagaaactagacagaatcattctcagaaactgctgcgtgatgtgtgcgttcaactctcagagtttaacttttcttttcattcagcggtttggaaacactctgtttgtaaagtctgcacgtggaaattttgaccacttagaggccttcgttggaaacgggttttttttcatgtaaggctagacagaagaattcccagtaacttccttgtgttgtgtgcattcaactcacagagttgaacgttcccttagacagagcagatttgaaaaactctatttgtgcaatttgcaagtgtagatttcaagcgctttaaggtcaatggcagaaaaggaaatatcttcgtttcaaaactagacagaatgattctcagaaaatcttttgtgatgtgtgcgttcaactcacagagtttaacttttcttctcatagagcagttaggaaacactctgtttgtaaagtctgcaagtggatattcagacgtctttgaggccttcgttggaaacgggatttcttcatattctgctagacagaataattctcagtaacttccttgtgttgtgtgtattcaactcacagagttgaaggatcctttacagagagcaggcttgaaacactctgtttgtcgaatttgcaagtggagatttcagccgctttgaggtcaaaggtagaataggaaatatcttcttatagaaactagacagaatgattctcagaaactcctttgtgatgtgtgcgttcaactcacagagtttaacatttcttttcatagagcagttaggaaacactctgtttgtaaagtctgcaagtggatattcagacctctttgaggccttcgttggaaatggctttttttcatataaggctagacagaagaattcccagtaactttccttgtgttgtgtgtgttcaactcacagagttgaactttcatttacccagagcagatatgaaacactctttttgtggaatttgcaagtggagatttcaagcgctttgaggccaaaggcagaaaaggaaatatcttcgtataaaaactagacagaatcattctcagaaactgctctgcgatgtgtgcgttcaactctcagagtttaacttttcttttcattcagcagtttggaaacactctgtttgtaaagtctgcacgtggataattggaccacttagaggccttcgttggaaacgggtttttttcatgtaaggctatacagaagaattcccagtaacttccttgtcttgtgtacattcaactcacagagttgaacgttcccttagacagagcagatttgaaacactctttttgtgcaattggcaaatggagatttcaagcgctttaaggtcaatggcaggaaaggaaatatcttcgtttcaaaactagacagaatgattctcagaaaatcttttgtgatgtgtgcgttcaactcacagagtttaacttttcttctcatagagcagttaggaaacactctgtttgtaaagtctgcaagtggatattcagacctctttgaggccttcgttggaaacgtgatttcttcatattatgctagacagaataattctcagtaactttccttgtgttgtgtgtattcaactcaccgagttgaaggatcctttacagagagcaggcttgaaacactctttttgtcgaatttgcaagtggagattacagccgctttgaggtcaatggtagaaaaggaaatatcttcgtataaagactagacagaacgattctcagaaactcctttgggatgtgtgcgttcaactcacagagtttaacctttcttttcatagagcagttaggaaacactctgtttgtaaagtctgcaagtggatattcagacctctttgaggccttcgttggaaacgggatttcttcctattctgctagacagaagaattctcagtaactttccttgtgttgtgtgtattcaactcacagagttgaacgatcctttacacagagcagacttgaaacactctttttgtggaatttgcaagtggagatttcagccgctttgaggtcaatagtagaaaagtaaatatcttcgtagaaaaactagacagaatcattctcagaaactgctctgcgatgtgtgcgttcaactctcagagtttaacttttcttttcattcagcagtgtggaaacactctgtttgtaaagtctgcccgtggatattttgaccacttagaggccttcgttggaaacgggtttttttcctgtaaggctagacagaagaattcccaggaacttccttgtgttgtgtacattcaactcacagagttgaacgttcccttagacagagcagatttgaaacactctttttgtgcaattggcaagtggggatttcagccgctttgaggtcaatggtagaaaaggaaatatcttcgtataaaaactagacagaatcattcccaaaaactgcgttgtgatgtgtgcgttcaactcacagagtttaacctttcttttcatagagcagttaggaaacactctgtttgtaaactctgcaagtggatattcagacctctttgaggccttcgttggaaacgggatttcttcatactgtgctagacagaagaattctcagtaacttccttgtgttgtgtgtattcaactcacacagttgaatgatcctttacacagagcagacttgaaacactctttttgtggaatttgcaagtggagatttcagccgctttgagttcaatggtagaataggaaatatcttcttatagaaactagacagaatgattctcagaaacttctttgtgatgtgtgcgttcaactcacagagtttaacctttcttttcatagagcagttaggaaacactctgtttttaaactctgcatgtggatattcagacctctttgaggccttcgttggaaacgggatttcttcatactgtgctagacagaagaattcccagtaacttcctagtgttgtgtgtgttcaactcacagagttgaactttcatttacacagagcagatttgaaacactctttttgtggaattttcaagtggaaatttcaagcgctttgaggccaaaggcagaaaaggaaatatcttcgtataaaaactagacagaatcattctcagaaactgctctgtgatgtgtgcgttcaactctcagagtttaacttttcttttcattcagcactttggaaacactctgtttgtaaagtcttcacgaggatattttgaccacttagaggtctttgttggaaacgggtttttttcccataaggctagacagaagaattcccagtaacttccttgtgttgtgtgcattcaactcacagagttgaacgttcccttagacagagcagatttgaaacactctatttgtgcaatttgcaagtgtagatttcaagcgctttaaggtcaacggcagaaaaggaaatatcttcgtttcaaaaccagacagaatcattccctcaaactgcgttgtgatgtgttcgttcaactcacagagtttaacctttctgttcatagagcagttaggaaacactctgtttgtaaagtctgtaagtggatattctgacatctggtggccttcgttggaaacgggatttcttcatattctgctagacagaagaattctcagtaacttccttgtgttgtgtgtattcaactcacagagttgaacgatcctttacacagagcagacttgaaacactctttttgtggaatttgcaagtggagatttcagccgctttgatgtcaatggtagaaaaggaaataacttcgtataaagactagacagaattattctcagaaactcctttgtgatgtgtgtgttcaactcacagagtttaacctttcttttcatagagcagttagtaaacactctgtttataaagtctgcaagtggatattcagacccctttgaggccttcgttggaaacgggatttcttcatattctgctagacagaagaattcccagtaacttccttgtgttgtgtgtgttcaactcacagagttgaacttccatttacacagagcagatttgaaacactctttttgtggaatttgcaagtggagatttcaagcgctttgaggccaaaggcagaaaaggaaatatcttcgtttcaaaactagacagaatcattctcagaaactgctctgcgatgtgtgcgttcaactctcagagtttaacttttcttttcattcagcagtttggaaacactctgtttgtaaagtccgcacgtggatattttgaccatttagaggccttcgttggaaacgggtttttttcttgtaaggctagacagaagaattcccagtaacttccttgtgttgtgtgcattcaactcacagagttgaacgttcccttagacagagaagatttgaaacactctatttgtgcaatttgcaagtgtagatttcaagcgctttaaggtcaacggcagaaaaggaaatatcttcgtttcaaaaccagacagaatcattcccacaaactgcgttgtgaagtgttcgttcaactcacagagtttaacctttctgttcatagagcagttaggaaacactctgtttgtaaagtctgtaagtggatattctgacatcttgtggccttcgttggaaacgggatttcttcatattctgctagacagaataattctcagtaacttccttgtgttgtgtgtattcaactcacagagttgaacgatcctttacagagagcagagttgaaactctctttttgtggaatttgcaagtggagatttcagccgctttgaggtcaatggtagaaaaggaaatatcttcctatagaaactagacagagtgattctcagaaactcctttgtgatgtctgcgttcaactgacagagtttaacctttcttttcatagagcagttaggaaacactctgtttgtaaagtctgcaagtggatattcagacctccttgaggccttcgttggaaacgggatttcttcatattatgctagacagaagaattctcagtaacttccttgtgttgtgtgtattcaactcacagaattgaacgatcctttacacagagcagacttgaaacactctttttgtggaatttgcaagtggagatttcagccgctttgaggtcaatggtagaataggatatatcttcctacagaaactagacagaatcattctcagaaactgttgtgcgatgtgtgcgttcaactctcagagtttaacttttcttttcattcaggagtttggaaacactctgtaaactctgcatgtggatattttgaccacttagaggccttcgttggaaacgggtttttttcctgtaaggctagacagaagaattcccagtaacttccttgtgttgtgtacattcaactcacagagttgaacgttcccttagacagagcagatttgaaacactctttttgtgcaattggcaagtggagatttcaagcactttgaggtcaatggcagaaaaggaaatatcttcgtttcaaaactagacagaatcattcccacaaactgcgttgtgatgtgttcgttcatctcacagagtttaacctttcttttcatagagcagttaggaaacagtctgtttgaaaattctgtaaggggatattctgacatcttgtggccttcgttggaaacgggatttcttcatattctgctagacaaaagaattctcagtaacttccttgtgttgtgtgtattcaactcgcagagttgaacgatcctttacacagagcagacttgaaacactctttttgtggaatttgcaagtgaagatttcagccgctttaaggtcaatggtagaaaagggaatatcttcgtataaagactagacagaatgattctcagaaactcctttgtgatgtgtgtgttcaactcacagagtttaacctttcttttcatagagcagttagtaaacactctgtttataaagtctgcaagtggatattcatacccctttgaggccttcgttggaaacgggatttcttcatattatgctagacagaagaattctcagtaacttccttgtgttgtgtgtattcaactgacagagttgaactttcatttagatagagcagatttgaaacactgtttttgtggaatttgcaagtggagatttcaagcgctttggggccaaagcagaaaaggaaatatcttcgtataaaaactagacagaatcattctcagaaattgctctgcgatgtgtgcgttcaactctcagagtttaacttttcttttcattcagcagtttggaaacactctgtttgtaaagtctgcacgtggatattttgaccatttagaggccttcgttggaaacgggtttttttcttgtaaggctagacagaagaattcccagtaacttccttgtgttgtgtacattcaactcacagagttgaacattcccttagacagagcagatttgaaacactctttttgtgcaattggcaagtggtgatttcagccgctttgaggtcaatggtagaaaaggaaatatcttcgtataaaaactagacagaatgattctcagaaactcctttgtgatgtgtgagttcaactcacagagtttatcctttcttttcatagagcagttaggaagcactctgtttgtaaagtctgcaagtggatattcagacctctttgaggccttcgttggaaacgggatttcttcatattctgctagacagaagaattctcagtaacttccttgtgttgtgtgcattcaactcacagagttgaacgatcctttacacagggcagacttgaaacactctttttgtggaatttgcaagcggacatttcagcctctttaaggttaatggtagaaaatgaaatatcttcgtatagaaactagacagaatgattctcagaaactcctttgtgatgtgtgcgttcaactcacagagttgaacctttcttttcatagagcagttaggaaacactctgtttgtaaagtctgcaagtggatattcagacatccttgaggctttcgttggaaacaggatttcttcatattctgctagaaagaagaattcccaataacttccttgtgttgtgtgtgttcaactcacagagttgaactttcatttacacagagcagatttgaaacactctttttgtggaatttgcaagtggagatttcaagcgctgtgaggccaaaggcagaaaaggaaatatcttcgtataaaaactagacagaatcattctcagaaactgctgcgtgatgtgtgcgttcaactctcagagtttaagttttcttttcattcagcggtttggaaacactctgtttgtaaagtctgcacgtggatattttgaccacttagaggccttcgttggaaacgggtttttttcatgtaaggctagacagaagaattcccagtaacttccttgtgttgtgtgcattccactcacagagttgaacgttcccttagacagagcagatttgaaacactctatttgtgcaatttgtaagtgtagatttcaagcgctttaaggtcaatggcagaaaaggaaatatcttcgtttcaaaactagacagaatgattctcagaaacttcattgtgttgtgagcgttcaactcacagagtttaacctttcttttcatagagcagttaggaaacactctgtttgtaaactctgcaagtggatattcagacctctttgaggccttcgttggaaacgggatttcttcatactgtgctagacagaacaattctcagtaacttccttgtgttgtgtgtattcaactcacagagttgaacgatcctttacacagagcggacttgaaacactctttttgtggaatttgcaagtggagatttcagccgcgttgaggtcaatggtagaaaaggaaatatcttcgtataaaaagtagacagaatgattctcagaaactcctttgtgatgtgtgtgttcaactcacagagtttaacctttcttttcatagagcagttagtaaacactctctttataaagtctgcaagtggatattcagacccctttgaggccttcgttggaaacgggatttcttcatattatgctagacagaagaattctcagtaacttccttgtgttgtgtgtattcaactgacagagttgaacattcatttggagagagcagatttgaaacactgtttttgtggaatttgcaagtggagatttcaagcgctttggggccaaaggcagaaaaggaaatatcttcgtataaaaactagacagaatgattctcagaaactcctttgtgatgtgtgcgttcaactctcagagtttaacttttcttttcattcagcagttcggaaacactctgtttgtaaagtctgcacgtggatattttgaccacttagaggccttcgttggaaacgggtttttttcctgtaaggctagacagaagaattcccagtaacttccttgtgttgtgtgcattcaactcacagagttgaacgttcccttagacagagcagatttgaaacactctatttgtgcaatttgcaagtgtagatttcaagcgctttaagagtcaatggcagaaaaggaaatatcttcatctcaaaactagacagaatgattctcagaaactcctttgagatgtgtgcgttcaactcacagagtttaacctttcttttcatagagcagttaggaaacactctgtttgtaaattctgcaagtggatattcagacctctttgaggccttcgttggaaacgggatttcttcatattatgctagacagaaggattctcagtaacttccttgtgttgtgtgtattcaactcacagagttgaacgatcctttacacagagcagacttgaaacactctttttgtggaatttgcaagtggagatttcagccgctttgaggtcaatggtagaaaaggagatatcttcgtataaaaactagacagaatgattctcagaaactctttgggatgtgtgcgttcaactcacagagtttaacttttcttttcatagagcagttaggaaacactctgtttgtaaagtctgcaagtggatattcagacctctttgaggccttcgttggaaacgggatttcttcatattatgctagacagaagaattctcagtaacttccttgtgttgtgtgtattcaactcacagagttgaaggatcctttacacagagcagactagaaacattctttttgtggaatttgcaagtggagatttcagccgctttgaggtcaatggtagaatgggaaatatcatcctatagaaactagacagaatcattctcagaaactgctgcgtaatgtgtgcgttcaactctcagagtttaacttttcttttcattcagcggtttggaaacactctgtttgtaaagtctgcacgtggaaattttgaccatttagaggccttcgttggaaacgggtttttttcatgtaaggctagacagaagaattcccagtaacttccttgtgttgtgtgcattcaactcacagagttgaacgatcctttacacagagcagacttgaaacactctttttgtggaatttgcaagtggagatttcagccgctttgaggtcaatggtagaaaaggaaactatcttcatataaagactagacagaatcattcccacaaactgcgttgtgaggtgttcgttcaactcacagagtttaacctttcttttcatagagcagttaagaaacagtctgtttgtaaattctgtaagtggatattctgacatcttgtggccttcgttggaaacgggatgtcttcatattctgctagacagaagaattctcagaatcttccttgtgttgtgtgtatttaactcacagagttgaacgatcctttacacagagcagacttgaaacactctttttgtggaatttgcaagtggagatttcagccgctttgaggtccatggtagaaaaggaaatatcttcgtataaaaactagacagaatgattctcagaaactcctttgtgatgtgtgcgttcaacacacagagttcaacctttcttttcctagagcagttgggaaacactctgtttgtaaagtctgcaagtggatattcagacttctttgaggccttcgttggaagcgggatttcttcatattctgctagacagaagaattcccagtaacttccttgtgttgtgtgtgttcaactcacagagttgaactttgatttacacagagcagatttgaaacactctttttgtggaatttgcaagtggagatttcaagcgctttgaggccaaatgcagaaaaggaaatatcttcgtataaaaactagacagaatcattctcagaaactgctctgcgatgtgtgcgttcaactctcagagtttaacttttcttttcattcagcagtttggaaacactctgtttgtaaagtctgcaggtggataatttgaccacttagaggccttcgttggaaacgggtttttttcctgtaaggctagacagaagaattcccagtaacttccttgtgttgtgtgcattcaactcacagagttgaaagttcccttcgacagagcagatttgaaacactctatttgtgcaatttgcaagtgtagatttcaagcgctttaaggtcaacggcagaaaaggaaatatcttcgtttcaaaactagacagaatcattcccacaaactgcgttgtgatgtgttcgttcaactcacagagtttaacctttctgttcatagaggagttaggaaacactctgtttgtaaagtctgtatgtggatattctgacatcttgtggccttcgttggaaacgggatttctttatattctgctagacagaacaattctcagtaacttccttgtgttgtgtgtattcaactcacagagttgaacgatcctttacacagagcggacttgaaacactctttttgtggaatttgcaagcggagatttcagctgcgttgaggtcaatggtagaaaaggaaatatcttcgtataaaaactagacagaatgattctcagaaacttcattgtgatgtgtgcgttcaactcacagagtttaacctttcttttcatagagcagttaggaaacactgtttgtaaactctgcaagtggatattcagacctctttgaggccttcgttggaaacgggatttcttcatactgtgctagacagaagaattcccagtaacttccttgggttgtgtgtgttcaactcacagagttgaactttcatttacacagagcagatttgaaacactctttttgtggaatttgcaaatggagatttcaagcgctttgaggaaaaaggcagtaaagggaatatcttcgtataaaaactagacagaatcattctcagaacctgctctgtgatgtgtgcgttcaactctcagagtttaacttttcttttcattcagcagtttggcaacactctgtttgtaaagtctgcacgtggataatttgaccacttagaggccttcgttggaaacgggtttttttcatgtaaggctagacagaagaattctcagtaacttccttgtgttgtgtgtattcaactcacagagttgaacgatcctttacacagagcagacttgtaacactctttttgtggaatttgaaagtggagatttcagccgctttgaagtcaaaggtagaaaaggaaatatcttcctataaaaactacacagaatcattcccaaaaactgcgttgtgatgtgttcgttcatctcacagagtttaacctttcttttcatagagcagttaggaaacactctgtttgtaaattctgtaagtggatattctgacatcttgtggccttcgttggaaacgggatttcttcatattctgctagacagaagaattctcagtaacttccttgtgttttgtgtattcaactcacatagttgaacgatcctttacacagagcagacttgaaacactctttttgtggtatttgcaagtggagatttcagccactttgaggtcaatgttagaaaaggaaatatcttcgtataaaaactagacagaatgattctcagaaactcctttgtgatgtgtgcgttcaactcacacagtttaacctttcttttcatagagcagttaggaaacactctgtttgtaaagtctgcaagtggatattcagacctccttgaggccttcgttggaaacgggatttgttcatattatgctagacagaagaattctcagtaacttccttgtgttgtgtgtattcaactgacagaattgaactttcatttagagagagcagatttgaaacactgtttttgtggaatttgcaagtggagatttcaagcgctttggggccaaaggcagaaaaggaaatatcttcgtataaaaactagacagaaatcattctcagaaactgctgcgtgatgtgtgcgttcacctctcagagtttaacttttcttttcattcagcggtttggaaacactctgtttgtaaagtctgcacgtggaaattttgaccacttagaggccttcgttggaaacgggtttttttcatgtaaggctagacagaagaattcccagtaacttccttgtgttgtgtgcattcaactcacagagttgaacgttcccttagacagagcagatttgaaacactctatttgtgcaatttgcaagtgtagatttcaagcgctttaaggtcaatgacagaaaaggaaatatcttcgtttcaaaactagacagaatgattctcaaaaactcctttgtgatgtgtgcgttcaactcacagagtttaacctttcttttcatagagcagttaggaaacactctggttgtaaagtctgcaagtggatattaagacctctttgaggccttcgttggaaacgggatttcttcatattctgctagacagaagaattctcagtaacttccttgtgttgtgtgtattcaactcacagagttgaacgatcctttacacagagcagacttgaaacactctttttctggaatttgcaagtggagatttcagccgctttgaggtcaatggtaggataggaaatatcttcctatagaaactagacagaatgattctcagaaactcctttgtgatgtgtgcgttcaactcacagagtttaacctttcttttcatagagcagttaggaaacactctgtttgttaagtctgcaagtggatattcagacctccttgaggccttcgttggaagcgggatttcttcatattctgctagacagaagaattcccagtaacttccttgtgttgtgtgtgttcaactcacagagctgaactttcatttacacagagcagatttgaaacactctttttgtggaatttacaaatggagatttcaagcgctttgaggccaaaggcagaaaaggaaatatcttcgtttcaaaactagacggaatgattctcagaaactgctctgcgatgtgtgcgttcacctctcagagtttaacttttcttttcattcagcagtttggaaacactctgtttgtaaagtctgcacgtgcataatttgaccacttagaggccttcgttggcaacgggtttttttcatgtaaggctagacagaagaattcccaggaacttccttgtgttgtgtacattcaactcacagagttgaacgttcccttagacagagcagatttgaaacactctttttgtgcaatgggcaagtggtgatttcagccgctttgaggtcaatggtagaaaaggaaatatcttcgtataaaaactagacagaatgattctcataaactcctttgtgatgtgcgcgttcaactcacagagtttaacctttcttttcatagagcagttaggaaacactctgtttgtaaagtctgcaagtggatattcagacctctttgaggccttcgttggaaacgggatttctttatattctgctagacagaagaattctcagtaacttccttgtgttgtgtttattcaactcacagagttgaatgttcctttacacagagcagacttgaaacactctttttgtggaatttgcaagtggagatttcagccgctttgaggtcaatggtagaaaagtaaatatcttcgtataaagactagacagaatgattctcagaaacttctttgtgatgtgtgcgttcaactcacagagtttaacctttcttttcatagagcagttaggaaacactctgtttctaaactctgcaagtggatattcagacctctttgaggccttcgttggaaacgggatttcttcatactatgctagacagaagaattctcaagtaacttccttgtgttgtgtgtattcaactcacagagtttaacgatcctttacacagagcagacttgtaacactctttttgtggaatttgcaagtggagatttcagccgctttgaagtcaaaggtagaaaaggaaatatcttcctataaaaactagacagaatcattctcagaaactgctctgcgatgtgtgcgttcaactcacagagtttaacttttcttttcattcagcagtttggaaacactctgtttgtaaagtctgcacgtggataatttgaccacttagaggccttcgttggaaacgggtttttttcatgtaaggctagacagaagaattcccagtaacttccttgtgttgtgtgcattcaactcacagagttgaactttcccttagacggagcagatttgaaacactctatttgtgcaatttgcaagtgtagatttcaagcgctttaaggtcaatggcagaaaaggaaatatcttcgtttcaaaactagagagaatcattcccacaaactgcgttgtgatgtgttcgttcaactcacagagtttaacctttctgttcatagagcagttaggaaacactctgtttgtaaagtctgtaagtggatattccgacctccttgaggccttcgttggaaacgggatttcttcatattctgctagacagaagaattctcagaaacttcctggtgttgtgtgttttcaactcacagagttcaacgatcctttacacagagtagacttgaaacactctttttgttgaattggcaagtggagatttcagctgctttgaggtcaatggtagaaaaggaaatatcttcgtacaaaaactagacagaatgattctcagaaaatcctttgtgatgtgtgcgttcaactcacagagtttaacttttcttttcatagagcagttaggaaacactctgtttgtaaagtctgcaagtggatattcagaccactttgaggccttcattggaaacgggatttcttcatattgtgctagacggaagaattctcagaaacttccttgtgttgcgtgttttcaactcacagagttcaacgatccgttacacagagtagacttgaaaaactctttttgttgaattggccagtggagatttcagccgctttgaggtcaatggtagaaaaggaaatatcttcgtataaaaactagacagaatcattctcagaaacggctctgcgatgtgtgcgttcaactctcagagtttaacttttcttttcattcagcagtttggaaacactctgtttgtaaagtctgcacgtggatattttgaccacttagaggccttcgtttgaaacgggtttttttcctttaaggctagagagaagaattcccagtaacatccttgtgttgtgtgtgttcaactcacagagttgaactttcatttacacagagcagatttgaaacactctttttgtggaatttgcaagtggagatttcaagcgctttgaggccaaaggcagaaaaggaaatatccttcgtttcaaaactagacagaagcattctcagaagctgctctgcgatgtgtgcgttcaactctcagagtttaacttttcttttcattcagcagtttggaaacactctgtttgtaaagtctgcacgtggataatttgaccacttagaggccttcgttggaaacgggtttttttcatgtaaggctagacagaagagttctcagtaacttccttgtgttgtgtgtattcaactcacacagttgaacgatcctttacacagagcagacttgtaacactctttttgtggaatttgcaagtggagatttcagccgctttgaagtcaaagtagaaaaggaaatatcttcctataaaaactagacagaatgattctcagaaacttctttgtgatgtgtgcgttcaactcacagagtttaacctttcttttcatagagcagttaggaaagactctgtttgtaaagtctgcaagtggatattcagacctctttgaggccttcgttggaaacgggtttttttcatataaggctagacagaagaattctcagtaacttccttgtgttgtgtgtattcaactgacagagttgaactttcatttagagagagctgatttgaaacactgtttttgtggaatttgcaagtggagatttcaagcgttttggggccaaaggcagaaaaggaaatatcttcgtataaaaactagacagaatcattctcagaaactgctgcgtgatgtgtgcgttcaactctcagagtttaacttttcttttcattcagcggtttggaaacactctgtttgtaaagtctgcacgtggatattttgaccacttagaggccttcgttggaaacgggttttttttcatgtaaggctagacagaagaattcccagtaacttccttgtgttgtgtgcattcaactcacagagttgaacgttcccttacacagagcagatttgaaacactctatttgtgcaatttgcaagtgtagatttcaagcgctttaaggtcaacggcagaaaaggaaatatcttcgtttcaaaactagacagaatcattcccacaagctgcgttgtgatgtgttcgttcaactcacagagtttaacctttctgttcatagagcagttaggaaacactctgtttgtaaagtctgtaagtggatattctgacatcttgtggccttcgttggaaatgggatttcttcatattctgctggacagaagaattctcagtaacttccttgtgttgtgtgtattcaactcacagagttgaacgatcctttacacagagcagacttgaaacgctctttttgtggaatttgcaagtggagatttcagccgcgttgaagtcaatggtagaaaaggaaatatcttcgtataaaaactagacagaatgattttcagaaactcctttgtgatgtgtgcgttcaattcacagagtttaacttttcatagagcagttaggaaacactctgtttgtaaagtctgcaagtggatattcagacctctttgaggccttcgttggaaacgggatttcttcatattatgctagacagaataattctcagtaacttccttgtgttgtgtgtattcaactcacagatttgaacgatcctttacagagagcagacttgaaacactctttttgtggaatttgcaagtggagatttcagctgctttgaggtcaatggtagaaaaggaattatcttcgtagaaaaactagacagaatcattctcagaaactgctgcgtgatgtgtgcgttcaactgtcagagtttaacttttcttttcattcagcggtttggaaacactctgtttgtaaagtctgcacgtggatattttgcccacttagaggccttcgttggaaacgggtttttttcatgtaaggctagacagaagaattcccagtaacttccttgtgttgtgtgcattcaactcacagagttgaacgttcccttagacagagcagatttgaaacactctatttgtgcaatttgcaagtgtagatctcaagcgctttaaggtcaatgggagaaaaggaaatatcttcgtttcaaaactagacagaatcattcccacaaactgcgttgtgatgtgttcgttcaactcacagagtttaacctttcttttcatagagtagttaggaaacagtctgtttgtaaattctgtaagtggatattctgacatcttgtggccttcgttggaaacgggatttcttcatattctgctagacagaagaattctcagtaacttccttgtgttgtgtgtattcaactcacagagttgaacgatcctttacacagagcagacttgaaacactctttttgtggaatttgcaagtggagatttcagccgctttgaggtcaatgttagaaaaggaaatatcttcctatagaaactagacagaatgattctgagaaactcctttgtgatgggtgcgttcaactcacagagtttaacctttcttttaatagagcagttaggaaacactctgtttgtaaagtctgcaagtggatattcagacatctttggggcattcgttggaaacgggatttcttcatattctgctagacagaagaattctcagtaacttccttgtgttgtgtgtattcaactgacagagttgaactttcatttagagagagcagatttgaaacactatttttgtggaatttgcaagtggagattacaagcgcttttgggccaaaggcagaaaaggaaatatcttcgtataaaaactagacagaatcattctcagaaactgctctgcgatatgtgcgttcaactctcagagtttaacttttcttttcattcagcagtttggaaacactctgtttgtaaagtctgcatgtgcgtaatttgaccacttagaggccttcgttggaaacaggttttgttcatgtaaggctagacagaagaattcccagtaacttaccttgtgttgtgtacattcaactcacagagttgaacgttcccttagacagagcagatttgaaacactctttttgtgcaattggcaagtggagatttcaagcgctttaaggtcaatggcagaaaaggaaatatcttcgtttcaaaactagacagaatcattcccacaaacttcgttgtgatgtgttcgttcaactcacagagtttaacctttctgttcatagagcagttaggaaacactctgtttgtaaagtctgtaagtggatattctgacatcttgtggccttcgttggaaacgggatttcttcatattctgctagacagaagaattctcagaaccttccttgtgttctgtgcattcaactcacagagttgaacgatcctttacacagagcagacttgaaacactctttttgaggaatttgcaagtggagatttcagccgctttgaggtccatggtagaaaaggaaatatcttcgtataaaaactagacagaatgattctcagaaagtccgttgtgatgtgtgcgttcaactcacagagtttaacctttcttttcatagagcagttaggaaacactctgtttgtaaagtctgcaagtggatattcagacctctttgaggccttcgttggaaacgggatttcttcatattatgctagacagaagaattcccagtaacttccttgtgttgtgtgtgttcaactcacagagttgaactttcatttacacagagcagatttgaaacactctttttatggaatttgcaaatggagatttcaagcgctttgaggccaaaggcagaaaaggaaatatcttcgtataaaaactagacagaatcattctcagaaactgctgcgtgatgtgtgcgttcaactctcagagtttaacttttcttttcattcagcggtttggaaacactctgtttgtaaagtctgcacgtggatattttgaccacttagaggccttcgttggaaacgggttttttacatgtaaggctagacagaagaattcccagtaacttcccttgtgttgtgtacattcaactcacagagttgaacgttcccttagacagagcagatttgaaacactctttttgtgcaattggcaaatggagatttcaagcgctttaaggtcaatggcagaaaaggaaatatcttcgtttcaaaactagacagaatcattcccacaaactgcgttgtgatgtgttcgttcaactcacagagtttaacctttcttttcatagagcacttaggaaagagtctgtttgtaaattctgtaagtggatattctgacatcttgtggccttcgttggaaacgggatttcttcatattctgctagacagaagaattctcagaaacttccttgtgttgtgtgttttcaactcacagaattgaacgatgctttacacagagtagacttgaaacactctttttgtgtaatttgcaagtggagatttcagccgctttgaggtcaatggtagaaaaggaaatatcttcgtataaaaactagacagaatgattctcagaaactcctttgtgatgtgggcgttcaactcacagagtttaacctttcttttcatagagcagttaggaaacactctgtttgttaagtctgcacgtggatacttggacttctttgaggccttcgttggaaacgggtttttttcatgtaaggctggacagaagaattctcagtaacttccttgtgttgtgtgtattcaactcacagagttgaatgatcctttacagagagcagacttgaaacactctttttgtggaatttgcaagtggagatttcagccgctttgaggtcaatggtagaataggaaatatcttcctatagaaactagacagaatcattctcagaaactgctctgcgatgtgtgcgttcaactctcagagtttaactttgcttttcattcagcagtttggaaacactctgtttgtaaagtctgcacgtggataatttgaccacttagaggccttcgttggaaacgggtttttttcatgtaaggctagacagaagaattcccagtaacttgccttgtgttgtgtgcattcaactcacagagttgaacgttcccttagacagagcagatttgaaacactctagttgtgcaatttgcaagtgtagatttcaagcgctttaaggtcaatggcagaaaaggaaatatcttcgtttcaaaactagacagaaatgattctcagaaactcctttgtgatgtgtgcgttcaactcacagagtttaacctttcttttcatagagcagttaggaaacactctgtttgtaaagtctgcaagtggatattcagacctccttgaggccttcgttggaaacgggatttcttcatattatgctagacagaagaattctcagtaaattccttgtgttgtgtgtattcaactcacagagttgaacgatcctttacacagagcagacttgaaacactctttttgtgaaatttgcaagtggagatttcagccgctttgtggtcaatggtagaataggaaatatcttcctatagaaactagacagaatgattctcagaaactcctttgtgatgtgtgtgttcaactcacagagtttaacctttcttttcatagaacagttagtaaacactctgtttataaagtctgcaagtggatattcagacccctttgaggccttcgttggaaacgggatttcttcatattatgctagacagaagaattctcagtaacttccttgtcttgtgtgtattcaactcacagagttgaacgatcctttacacagagcagacttgaaacactccttttgtggaatttgcaagtggagatttcagccgctttgaggtcaatggtagaataggaaatatcttcctatagaaactagacagaatgattctcagaaactcctttgtgacgtgtgtgttcaactcacagagtttaacctttcttttcatagagaagttagtaaacactctgtttataaagtctgcaagtggatattcagacccctttgaggccttcgttggaaacgggatttcttcatattatgctagacagaagaattcccagtaacttccttgtgttgtgtgtgttcaactcacagagttgaactttcatttacacagaacagatttgaaacactctttttgtggaatttgcaagtggagatttcaagcgctttgaggccaaaggcagaaaaggaaatatcttcgtttcaaaactagacagaatcattctcagaaactgctctgtgatgtgtgcgttcaactctcagagtttaacttttctgttcattcagcagtttggaaacactctgtttgtaaagtctgcacgtggataatttgaccacttagaggccttcgttggaaacgggtttttttcatgtaaggctagacagaagagttctcagtaacttccttgtgttgtgtgtattcaactcacacagttgaacgatcctttacacagagcagacttgtaacactctttttgtggaatttgcaaatggagatttcagccgctttgaagtcaaagtagaaaaggaaatatcttcctataaaaactagacagaatcattcccacaaactgcgttgtgatgtgttcgttcaactcacagagtttaacctttcttttcatagagcagttaggaaacagtctgtttgtaaattctgtaagtggatattgtgacatcttgtggcctttgttggaaacgggatttcttcatattctgctagacagaagaattctcagtaacttccttgtgttgtgtgtattcaactcacagagttgaacggtcctttacacagagctgacttgaaccactctttttgtgggatttgcaagtggagatttcagccgctttcaggtcaatggtagaataggaaatatcttcctatagaaactagacagaatgattctcagaaactcctttgtgatgtgtgtgttcaactcacagagtttaacctttcttttcatagagcagttagtaaacactctgtatataaagtctgcaagtggatattcagacccctttgaggccttcgttggaaacgggatttcttcatattatgctagacagaagaattctcagtaacttccttgtgttgtgtgtattcaactgacagagttgaactttcatttggagagagcagatttgaaacactgtttttgtggaatttgcaagtggagatttcaagcgctttggggccaaaggcagaaaaggaaatatcctcgtataaaaacatgacagaaatcattctcagaaaccgctctgtgatgtgtgcgttcaactctcagagtttaacttttctttccattcagcagtttggaaacactctgtttgtaaagtctgcacgtggatattttgaccacttagaggtcttcgttggaaacgggtttttttcatgtaaggctagacagaagaattcccagtaacttccttgtgttgtgtgcattcaactcacagagatgagcgttcccttagacagagcagatttgaaacactctatttgtgcaatttgcaagtgtagatttcaagcgctttaaggtcaatggcagaaaaggaaatatcttcgtttcaaaactagacagaatcattcccacaaactgcgttgtgatgtgttcgttcaactcacagagtttaacctttcttttcatagagcagttaggaaacagtctgtttgttaattctgtaagtggatattctgacatcttgtggccttcgttggaaacgggatttcttcatattctgctagacagaagaattctcagtaacttccttgtgttgtgtgtattcaactcacagagttgaatgatcctttacacagtacagtcttgaaacactctttttgtggaatttgcaagtggagatttcagccgctttgaggtcaatggtagaataggaaataccttcctatagaaactagacagaatgattctcaaaaacttctttgtgatgtgtgcgttcaactcacagagtttaacctttcttttcatagagcagttaggaaacactctgtttgtaaactctgcaagtggatattcagacctgtttgaggccttcgttggaaacgggatttcttcatactatgctagacagaagaattctcagtaacttccttgtgttgtgtgtattcaactgacagagttgaactttcatttagagagagcagatttgaaacactgtttttgtggaagttgcaagtggagatttcaagcgctttggggccaaaggcagaaaaggaaatatcttcgtataaaaactagacagaatcattctcagaaactgctgcgtgatgtgtgcgttgaactctcagagtttaacttttcttttcattcagcggtttggaaacactctgtttgtaaagtctgcacgtggaaattttgaccacttagaggccttcgttggaaacgggattttttcatgtaaggctagacagaagaattcccagtaacttccttgtgttgtgtgcattcaactcacagagttgaacgttccgttagacagagcagatttgaaacactctatttgtgcaatttgcaagtgtagatttcaagcgctttaaggtcaatggcagaaaaggaaatatcttcgtttcaaaactagacagaatcattcccacaaactgcgttgtgatgtgttcgttcaactcacagagtttaacctttctgttcatagagcagttaggaaacactctgtttgtaatgtctgtaagtggatattctgacatcctgtggccttcgttggaaacgggatttcttcatattctgctagacagaagaattctcagtaactgccttgtgttgtgtgtattcaactcacagagttgaacgatcctttacacagagcagacttgaaacactccttttgtggaatttgcaagtggagatttcagctgctttgaggtcaatggtagaataggaaatatcttcctatagaaagtagacagaatgattctcagaaactcctttgtgatgtgtgcgttcaactcacagagtttaccctttcttttcatacagcagttgggaaacactctgtttgtaaagtctgcaagtggatattcagacctccttgaggctttcgttggaaacgggatttcttcatattctgctagaaagaagaattcccagtaacttccttgtgttgtgtgtgttcaactcacagagttgaactttcatttacacagagcagatttgaaactctctttttgtggaatttccaagtggagatttcaagcgctttgaggccaaaggcagaaaaggaaatatcttcgtttcaaaactagacagaatcattctcagaaactgcactgcgatgtgtgcgttcaactctcagagtttaacttttcttttcattcagcagtttggaaacactctgtttgtaaagtctgcacgtggataatttgaccacttagaggccttctttggaaacgggtttttttcatgtaaggctagacagaagaattcccagtaacttcccttgtgttgtgtgtgttcaactcacagagttgaactttcatttacacagagcagatttgaaacactctttttgtggaatttgcaagtggagatgtcaagcgctttgaggccaaaggcagaaaaggaaatatcttcgtttcaaaactagacagaatcattcccacaaactgcgttgtgatgtgttcgttcaactcacagagtttaacctttcttttcatagagcagttaggaaacactctgttggtaaattctgtaagtggatattctgacatcttgtggccttcagtggaaacgggatttcttcatattctgctagacagaagaattctcagaaacttccttgtgttgtgtgttttcaactcacagagttgaacgatgctttacacagagtagacttgaaacactctctttgtgtaatttgcaagtggagatttcagccgctttgaggtcaatggtagaaaaggaaatatcttcgtataaaaactagacagaatgattctcagaaactcctttgtgatgtgtgcgttcaactcacagagttcaacctttcttttcatagagcagttaggaaacactctgtttataatgtctgcaagtggatattcagacctctttgaggccttctttggaaacgggatttcttcatattctgctagacagaagaattcccagtaacttccttgtgttgtgtgtgttcaactcacagagttgaactttcatttgcacagagcagatttgaaacactctttttgtggaatttgcaagtggagatttcaagcgctttgaggccaaaggcagaaaagaaggaaatatattcgtataaaaactagacagaatcattctcagaaactgctctgcgatgtgtgcgttcaactctcagagtttaacttttcttttcattcagcagtttggaaacactctgtttgtaaagtctgcacgtggataacttgaccacttagaggacttcgttggaaacgggtttttttcctgtaaggctagacagaagaattcccagtaacttccttgtgttgtgtacattcaactcacagagttgaacgttccctaagacagagcagatttgaaacactctttttgtgcaattggcaagtggtgatttcagccgctttgaggtcaatggtataaaaggaaatatcttcgtataaaaactagacagaatcattcccacaaactgcgttgtgacgtgttcgttcaactcacagagtttaacctttcttttcatagagcagttaggaaacagtctgtttgtcaattctttaagtggatattctgacatattgtggccttcgttggaaacgggatttcttcatattctgctagacagaagaattctcagtaacttccctgtgttgtgtgtattcaactcacagagttgaacgatcctttacacagagcagacttgagacactctttttgtggaatttgcaagtggagatttcagccgctttgaggtcaatggtagaaaaggaaatatcttcgtataaaaactagacagaatgattctcagaaactcctttatgatgtgtgcgttcaactcacagagtttaacctttcttttcatagagcagttaggaaacactcagtttgtaatgtctgcaagtggataatcagacctctttgaggccttcgttggaaacgggatttcttcatattctgatagacagaagaattcccagtaacttcccttgtgttgtgtgtgttcaactcacagagttgaactttcatttacacagagcagatttgaaactctctttttgtggaatttgcaagtggagatttcaagcgctttgaggccaaaggcagaaaaggaaatatcttcgtttcaaaactagacagaatcattctcagaaactactctgcgatgtgtgcgttcaactctcagagtttaacttttcttttcattcagcagtttggaaacactctgtttgtaaagtctgcacgtggataacttgaccacttagaggccttcgttggaaacgggtttttttcacgtaaggctagacagaagaattcccagtaacttccttgtgttgtgtacattcaactcacagagttgaacgttcccttagacagagcagatttgaaacactctttttgtgcaattggcaagtggagatttcaagcgctttgtggtcaatggcagaaaaggaaatatcttcgtttcaaaactagacagaaatcattcccacaaactgcgttgtgatgtgttcgttcaactcacagtagtttaacctttctgttcatagagcagttaggaaacactctgtttgtaaagtctgtaagtggatattctgacatcttgtggccttcgttggaaacgggatttcttcatattctgctagacagaagaattctcagaaacttccttgtgttgtgtgtattcaactcacagagttgaatgatcctttacacagaacagtcttgaaacactctttttgtggaatttgctagtggagatttcagccgctttgaggtcaatggtagaataggaaatatcttcctatagaaactagacagaatgattctcagaaactcctttgtgatgtgtgtgttcaactcacagagttcaacctttcttttcatagagcagttgggaaacactctgtttgtaaagtctgcaagtggatattcagacctccttgaggctttcgttggaaacgggatttcttcatattctgctagacagaagaattctcagttacttccttgtgttgtgtgtattcaactcacagagttgaacgatcctttacacagagcagacttgaaacactctttttgtggaatttgcaagtggagatttcagccgctttgaggtcaatggtagaaaaggaaatatcttcgtataaaaaatagacagaatcattctcagaaactgctctgcgatgtgtgcgttcaactctcagagtttaacttttcttttcattcagcagtttggaaacactctgtttgtaaagtctgcacgtggataacttgaccacttagagtccttcgttggaaacgggtttttttcatgtaaggctagacagaagaattctcagtaacttccttgtgttgtgtgtattcaactcacagagttgaacggatcctttacacagagcagacttgaaatactctttttgtggaatttgcaagtggagatttcagccgctttgaggtcaatggtagaataggaaatatcttcctatagaaactagacagaatgattctcagaaactcctttgtgatgtgtgcgttcagctcacagagtttaacctttcttttcatagagcagttaggaaacactctgtttgtaaagtctgcaagtggatattcagacatccttgaggctttcgttggaaacgggatttcttcatattctgctagaaagaagaattctcagtaacttccttgtgttgtgtgtattcaactcacagagttcaacgatcctttacacagagcagacttgaaacactctttttgtggaatttgcaagtggagatttcagccgctttgagttcaatggtagaataggaaatatcttcctatagaaactagacagaacgattctcagaaactcctttgtgatgtgtgcgttcaactcacagagtttaacctttctgttcatagagcagttaggaaacactctgtttgtaaagtctgcaagtggatattcagacctctttgaggccttcgttggaaacgggatttcttcctattctgctagacagaagaattctcagtaacttccttgtgttgtgtgtattcaaatgacagagttgaatttcatttagagagagcagattggaaacactgtttttgtggaatttgcaagtggagatttcaagcgctttggggccaaatgcagaaaaggaaatatcttcgtataaaaactagacagaatcattctcagaaactgctgcgtgatgtgtgcgttcaactctcagagtttaacttttcttttcattcagcggtttggaaacactctgtttgtaaagtctgcacgtggatattttgaccacttagaggccttcgttggaaactggtttttttcatgtaaggctagacagaagaattcccagtaacttccttgtgttctgtacattcaactcacaggagttgaacgttcccttagacagagcagatttgaaacactctttttgtgcaattggcaagtggagatttcaagcgctttaaggtcaatggcagaaaaggaaatatcttcgtttcaaaactagacagaatgattctcagaaactcctttgtgatgtgtgcgttcaactcacagagttcagcctttcttttcatagagcagttgggaaacactctgtttgtaaagtctgcaagtggatattcagacttctttgaggccttcgttggaagcgggatttcttcatattctgctagacagaagaattctcagtaacttccttgtgttgtgtgtattcaactcacagagttcaacgatcctttacacagagtagacttgaaacactctttttgtggaattggcagggtggagatttcagccgctttgaggtcaatggaagaaaaggaaatatattcgtataaaaactagacagaatgattctcataaactcctttgtgatgtgtgcgttcaactcacagagtttaacttttcttttcatagagcagttaggaaacactctgtttgtaaagtgtgcaagtggatattcagacctctttgaggccttcgttggaaacgggatttctttatattatgctagacagaataattctcagtaagttccttgtgttgtgtgtattcaactcacagagttgaacgatcctttacacagagcagacttgaaacattctttttgtggaatttgcaagtggagatttcagccgctttgaggtcaatggtagaataggaaatatcttcctatagaaactagacagaatcattctcagaaacttctctgcgatgtgtgcgttcaactctcagagtttaacttttcttttcattcagcagtttggaaacactctgtttgtaaagtctgcacgtggatattttgaccacttagaggcattcgttggaaacgggatttttcctgtaaggctagacagaagaattcccagtaacttccttgtgttgtgtacattcaactcacagagttgaacgttcccttagacagagcagatttgaaacactctttttgtgcaattggcaagtggagatttcaagcgctttaaggtcaatggcagaaaaggaaatatcttattttcaaaactagacagaatcattcccacaaactgcgttgtgatgtgttcgttcaactcacagagtttaacctttctcttcatagagcagttaggaaacactctgtttgtgaagtctgtaagtggatattctgacatcttgtggccttcgttggaaacgggatttcttcatattctgctagacagaagaattctcagtaacttccttgtgttgtgtgaattcaactcacagagttgaacgatcctttacacagagcagacttgaaacacgctttctgtggaatttgcaattggagatttcagccgctttgaggtcaatggtagaataggaaatatcttcgtataaaaactagacagaatgattctcagaaactcctttgtgatgtgtgcgttcaactcacagagtttaacttttcttttcatagagcagttaggaaacactctgtttgtaaagtctgcaagtggatattcagacctctttgaggtcttcgttggaaacgggatttcttcatattctgctagacagaagaattctcagtaacttccttgtgttgtgtgtattcaactgacagagttgaactttcatttagagagagcagatttgaaacactgtttttttggatttgcaagtggagatttcaagcgctttggggccaaaagcagaaacgtaaatatcgtcgtataaaaactagacagaatcattctcagaaagtgctctgcgatgtgtgcgttcaactctcagagtttaactttgcttttcattcagcagtttggaaacactctgtttgtaaagtctgcacgtggataatttgaccacttagaggccttcgttggaaacgggtttttttcatgtaaggctagacagaagaattccccgtaacttccttgtgttgtgtgcattcaactcacagagttgaacgttcccttagacagagcagatttgaaacactctatttgtgcaatttgcaagtgtagttttcaagctctttaaggtcaacggcagaaaaggaaatatcttcgtttcaaaactagacagaatcattcccacaaactgcgttgtgatgtgttcgttcaactcacagagtttaacctttctgttcatagagcagttaggaaacactctgtttgtaaactctgtaagtggatattctgacatcttgtggccttcgttggaaacgggatttcttcatattctgctagacagaagaattctcagtaacttccttgtgttgtgtgtattcaactcacagagttgaacgatcctttacacagagcatacttgaaacactcttcttgtggaatttgcaagtggagatttcagccgctttgaggtcaatggtagaataggaaatatcttcctatagaaactagacagaatgattctcagaaactcctttgtgatgtgtgtgttcaactcacagagtttaacctttcttttcatagagcagttaggaaacactctgtttgaaaagtctgcaagtggatattcagacctccttgtggccttcgttggaaacgggatttcttcatattctgctagacagaagaattcccagtaactttccttgtgttgtgtgtgttcaactcacagagttgaactttcatttacacagagcagatttgaaacactctttttgtggaagttgcaagtggagatttcaagcgctttgaggccaaaggcagaaaaggaaatatcttcgtttcaaaactagacagaatcattctcagaaactgctctgcgatgtgtgcgttcaactctcagagtttaacttttcttttcattcagcagtgtggaaaaattctgtttgtaaagtctgcacgtggatattttgaccacttagaggccttcgttggaaacgggtttttttcctgtaaggctagacagaagaattcccagtaacttccttgtgttgtgttcattcaactcacagagttgaacgttcccttagacagagcagatttgaaacactctttttgtgcaattggcaaatggagatttcaagcgctttaagttcaaaggcagaaaaggaaatatcttcgtttcaaaactagacagaatcattcccacaaactgcgttgtgatgtgttcgttcaactcacagagtttaacctttctgttcatagagcagttaggaaacactctgtttgtaaagtctgtaagtggatattctgacatattgtggccttcgttggaaacgggatttcttcatattctgctagacagaataattctcagtaacttccttgtgttgtgtgtattcaactcacagagttgaaggatcctttacagagagcaggcttgaaacactctttttgtcgaatttgcaagtggagatttcagccgctttgaggtcaatggtagaataggaaatatcttcttatagaacctagacaaaatgattctcagaaactcctttgtgatgtgtgtgttcaactcacagagtttaaccttgcttttcatagagcagttagtaaacactctgtttataaagtctgcaagtggatattcagacccctttgaggccttcgttggagacgggatttcttcatattatgctagacagaagaattcccagtaacttccttgtgttgtgtgtgttcaactcacagagttgaactttgatttacacagagcagatttgaaacactctttttgtggaatttgcaagtggagatttcaagcgctttcaggccaaaggcagaaaaggaaatatgttcgtataaaaactagacagaatcattctcagaaactgctctgcgatgtgtgcgttcaactctcagagtttaagttttcttttcattcagcagtttggaaacactctgtttgtaaagtctgcacgtggatattttgaccacttagaggccttcgttggaaacgggtttttttcgtgtaaggctagacagaagaattcccagtaacttccttgtgttgtgtgcattcaactcacagagttgaacgttcccttagacagagcagatttgaaacactctatttgtgcaatttccaagtgtagatttcaagcgctttaaggtcaacggcagaaaaggaaatatcttcgtttcaaaactagacagaatcattcccacaaactgcgttgtgatgtgttcgttcaaatcacagagtttaacctttcttttcatagagcagttaggaaacagtctgtttgtaaattctgtaagtggatattctgacatcttgtggccttcgttggaaacgggatttcttcatattctgctagacagaagaattcccagtaacttccttgtgttgttgtacattcaactcacagagttgaacgatcctttacacagagcagacttgaaacactctttttgtggaatttgcaagtggagatttcagccgctttgaggtccatggtagaaaaggaaatatcttcgtataaaaactagacagaaagattctcagaaactcctttgtgatgtgtgcgttcaactcacagagtttaacctttctgttcatagagcagttaggaaacactctgtttgtaaagtctgcaagtggatattcagacctctttgaggccttcgttggaaacgggtttttttcatataaggctagacagaagaattctcagtaacttccttgtgttgtgtgtattcaactgacagagttgaactttcatttggagagagcatttttgaaacactgtttttgtggaatttgcaagtggagatttcaagcgctttggggccaaaggcagaaaaggaaatatcttcgtataaaaactagacagaacgattctctgaaactcctttgtgatgtgtgcgttcaactcatagagtttaacctttctgttcatagagcagttaggaaacactctgtttgtaaagtctgcaagtggatattcagacctctttgaggcctacgttggaaacgtgtttttttcatgtaaggctagacagaagaattcccactaacttccttgtgttgtgtgcattcaactcacagagttgaacgttcccttagacagagcagatttgaaacactctatttgtgcaatttgcaagtgtagatttcaagcgctttaaggtcaacggcagaaaaggaaatatcttcgtttcaaaactagacagaatcattcccacaaactgcgttgtgatgtgttcgttcaactcacagagtttaacctttcttttcatagagcagttattaaacagtctgtttgtcaattctgtaagtggatattctgacatcttgtggccttcgttggaaacgggatttcttcatattctgctagacagaagaattctcagtaacttccttgtgttgtgtgaattcaactcacagagttgaacgatcctttacacagagcagacttgaaacactctttttgtggaatttgcaagtggagatttcagccgctttgttgtcaatagtagaataggaaatatcttcctatagaaactatacagaatgattctcagaaactcctttgagatgtgtgcgttcaactcacagagtttaacctttcttttcatagagcagttaggaaacactctgcttgtaaagtctgcaagtggatattcagccctctttgaggccttcgttggaaacgggtttttttcatataaggctagacagaagaattcccagtaacttccttgtgttgtgggtgttcgactcacagagttgaactttcatttacacagagcagatttgaaacactctttttgtggaatttgcaagtggagatttcaagcgctttgaggccaaaggcagaaaaggaaatatcttcgtttcaaaactagacagaatcattctcagaaactgctctgcgatgtgtgcgttcaactctcagattttaacttttcttttcattcagcactttggaaacactctgtttgtaaagtctgcacgtggatattttgaccacttagaggccttcgttggaaacgggtttctttcttgtaaggctagacagaagaattcccagtaacttccttgtgttgtgtacattcaactcacagagttgaacgttcccttagacagagcagatttgaaacactctttttgtgcaattggcaagtggagatttcaagcgctttaaggtcaatggcagaaaaggaaatatcttcctttcaaaactagacagaatgattctcagaaacttctttgtgatgtgtgcgttcaactcacggagtttaacctttcttttcatagagcagttaggaaacactctgtttgtaaactctgcaagtggatattcagacctctttgaggtcttcgttggaaacgggatttcttcatactatgctagacagaagaattctcagtaacttccttgtgttgtgtgtattcaactcacagagttgaacgatcctttacagagagcagacttgaagcactctttttgtggaatttgcaagtggagatttcagccgctttgaggtcaatggtagaataggaaatatcttcctatagaaactagacagaatgattctgagaaactcctttgtgatgtgtgcgttcacctcacagagtttaacctttcttttcatagagcagttaggaaacactctgtttgtaaagtctgcaagtggatattcagacctccttgaggccttcgttggaaacgggatttcttcatattatgctagacagaagaattcccagtaacttccttgtgttgtgtgtgttcaactcacagagttgaactttcatttacacagagcagatttgaagcactctttttgtggaatttgcaagtggagatttcaagcgctttgatgccaaaggcagaaaaggaaatatcttcgtataaaaactagacagaatcattctcagaaactgctctgcgatgtgtgcgttcaactctcagagtttaacttttcttttcattcagcagtgtggaaaaactctgtttgtaaagtctgcacgtggatattttgaccacttagaggccttcgttggaaacgggtttttttcctgtaaggctagacagaagaattcccagtaacttccttgtgttgtgtacattcaactcacagagttgaaggttcccttaaacagagcagacttgtaacactctttttgtggaatttgcaagtggagatttcagccgctttgaagtcaaaggtagaaaaggaaatatcttcctataaaaactagacagaatgattctcagaaactcctttgtgatgtgtgcgttcaactcacagagttcaacctttgttttcatagagcagttgggaaacactctgtttgtaaagtctgcaagtggatattcagacttctttgaggccttcgttggaagcgggatttcttcatattctgctagacagaagaattctcagtaacttccttgtgttgtgtgtattcaactcacagagttgaatgatcctttacacagagcagacttgaaacactctttttgtggaatttggaagtggagatttcagcccgctttgagttcaatggtagaataggaaatatcttcctatagaaactagacagaatgattcacagaaactcctttgtgatgtgtgcgttcaactcacagagtttaacctttcttttcatagagcagttaggaaacactctgtttgtaaagtctgaaagtggatattcagacatctttgaggccatcgttggaaacgggatttctacatattctgctagagagaagaattctcagtaacttcgttgtgttgtgtgtattcaactcacagagttgaacgatcctttacacagaacagacttgaaacactctatttgtggaatttgcaagtggagatttcagccgctttgaggtcaatggtagaataggaaatatcttcctatagaaactagacagaatgattctcagaaactcctttgtgatgtgtgcgttcaactcacagagtttaacttttcttttcattcagcagtttggaaacactctgtttgtaaagtctgcacgtggctattttgaccacttagattccttcgatggaaacgggtttttttcatgtaaggctagacagaagaattcccagtaacttccttgtgttgtgtacattcaacacacagagttgaacgttcccttagacagagcagatttgaaacactctttttgtgcaattggcaagtggagatttcaagcgctttaaggtcaatggcagaaaagtaaatatcttcgtttcaaaactagacagaatcattcccacaaactgcgttgtgatgtgttcgttcaacccacagagtttaaccattcttttcatagagcagttaggaaacactctgtttgtaaattctgtaagtggatattctgacatcttttggccttcgttggaaacgggatttcttcatattctgctagacagaagaattctcagaatcttccttgtgttgtgtgtcttcaactcacagagttgagcgatggtttacacagagcagatttgaaacactctttttgtggaatttgcaagtggagatttcagccgctttgaggtcaatggtagaaaaggaaatgtcttcgtataaaaactagacagaatgattctcagaaacttctttgtgatgtgtgcgttcaactcacagagtttaacctttcttttcatagagcagttaggaaacactctgtttgtaaactctgcaagtggatattcagacctctttgaggccttcgttggaaacgggatttcttcatattatgcctgagagaagaattctcagtaacttccttgtgttgtgtgtattcaactgacagagttgaactttcatttagagagagcagatttgaaacactgtttttgtggaatttgcaagtggagatttcaagcgctttggggccaaaggcagaaaaggaaatatcttcgtataaaaactagagagaatcattctcagaaactgctctgcaatgtgtgcgttcaactctcagagtttaacttttcttttcattcagcagtttggaaacactctgtttgtaaagtctgcacgtggataatttgaccacttagagaccttcattggaaacgggtttttttcctgtaaggctagacagaagaattcccagtaacttccttgtgttgtgtgcattcaactcacagagttgaacgttcccttagacagagcagatttgaaacactctatttgtgcaatttgcaagtgtagatttcaagcgctttaaggtcaacggcagaaatggaaatatcttcgtttcaaaactagacagaaatcattcccacaaactgcgttgtgatgtgttcgttcaactcacagtagtttaacctttctgttcatagagcagttaggaaacactctgtttgtaaagtctgtaagtggatattctgacatcttgtggccttcgttggaaacgggatttcttcatattctgctagacagaagaaatctcagaatcttccttgtgttgtgtgtattcaactcacagagttgaacgatcctttacacagagcagacttgaaacactctttttgtggaatttgcaagtggagatttcagccgctttgaggtccatggtagaaaaggaattatcttcgtataaaaagtagacagaatgattctcagaaactcctttgtgatgtgtgcgttcaactcacagtagtttaacctttcttttcatagagcagttaggaaacactctgtttgtaaagtctgcaagtggatattcagacttccttgaggccttcgttggaaacgggtttttttcatataaggctagacagaagaattctcagtaacttccctgtgttgtgtgtattcaactgacaaagtcgaactttcatttagagagagcagatttgtaacattgtttttgtggaatttgcaagtggagatttcaagcgctttggggccaaaggcagaaaatgaaatatcttcgtataaaaactagacagaatcattctcagaaactgctctgcgatgtgtgcgttcaactctcagagtttaacttttcttttcattcagcagtttggaaacactctgtttgtaaagtctgcacgtggatattttgaccacttagaggccttcgttggaaacgggtttctttcctgtaaggctagacagaagaattcccagtaacttccttgtgttgtgtacattcaagtcacagagttgaacgttcccttagacagagcagatttgaaacactctttttgtgcaattggcaagtggagatttcaagcgctttaaggtcaatggcagaaaaggaaatatcttcgtttcaaaactagacagaatcattcccacaaactgcgttgtgatgtgttcgttcaactcacagagtttaacctttcttttcatagagcagttaggaaacagtctgtttgtcaattctgtaagtggatattctgacagcttgtggccttcgttggaaacgggatttcttcatattctgctagacagaagaattctcagaatcttccttgtgttgtgtgtattcaactcacagagttgaacgatcctttacacagagcggacttgaaacactctttttgtggaatttgcaagtggagatttcagccgcgttgaggccaaaggcagaaaaggaaatatcttcgtttcaaaactagacagaatgattctcataaactcctttgtgatgtgtgcgttcaactcacagagtttaacctttcttttcatagagcagttaggaaacactctatttgtaaagtctgcaagtggatattcagacctccttgaggccttcgttggaaacgggatttcttcatattctgctagacagaacaattcccagtaacttccttgtgttgtgtgtgttcaactcacagagttgaactttcatttacacagagcagatttgaaacactctttttgtggaatttgcaagtggagatttcaagcgctttgaggtcaatggcagaaaaggaaatatcttcatataaaaactagacagaatcattctcagaaactgctctgcaatgtgtgcgttcaactctcagagtttaacttttcttttcattcagcagtttggaaacactctgtttctaaagtctgcacgtggatattttgaccacttagaggccttcgttggaaacgggtttttttcctgtaaggctagacagaagaattcccagtaacttccttgtgttgtgtacattcaactcacagagttgaacgttcccttagacagagcagatttgaaacactctttttgtgcaattggcaagcggagatttcaagcgctttaaggtcaatggcagaaaaggaaatatcttcgtttcaaaactagacagaatcattcccacaaactgcgttgtgatgtgttcgttcaactcacaggagtttaacctttcttttcatagagcagttaggaaacagtctgtttgtaaattctgtaaatggatattctgacatcttgtggccttcgttggaaactggatttcttcatactatgctagacagaataattctcagtaacttccttgtgttgtgtgtattcaactcacagagttgaacgatcctttacacagagcagacttgaaacattctttttgtggaatttgcaagtggagatttcagccgctttgaggtcaatggtagaataggaaatatcttcctatagaaactagacagaatgattctcagaaactcctttgtgatgtgtgtgttcaactcacagagtttaacctttcttttcatagagcagttagtaaacactctgtttataaagtctacaagtggatattcagacccctttgaggccttcgttggaaacgggatttcttcatattatgctagacagaagaattcccagtaacttccttgtgttgtgtgtgttcaactcacagagttgaactttcatttacacagagcagatttgaaacactctttttgtggaatttgcaagtggagatttcaagcgatttgaggccaaaggcagaaaaggaaatatcttcgtataaaaactagacagaatcattctcagaaactgctctgcgatgtgtgcgttcaactctcagagtttaacttttcttttcattcagcattttggaaacactctgtttgtaaagtctgcacgtggatattttgaccacttagaggccttcgttggaaacgggtttttttcctgtaaggctaaaaagaagaattcccagtaacttccttctgttgtgtacattcaactcacagagttgaacgctcccttagacagagcagatttgaaacactctttttgggcaattggcaagtggagattacaagcgctttaaggtcaatggcagaaaaggaaatatcttcgtttcaaaactagacagaatgattctcagaaacttctttgtgatgtgtgcgttcaactcacagagtttaacctttcttttcatagaacagttaggaaacactctgtttgtaaacactgcaagtggatattcagacctctttgaggccttcgttggaaacgggatttcttcatactatgctagacagaagaattctcagtaacttccttgtgttgtgtgtattcaactcacagagttgaacgatcctttacacagagcagacttgaaacactctttttgtggaatttgcaactggagatttcagccgcgttgaggtcaatggtagaaaaggaaatatcttcgtataaaaactggacagaatgattctcagaaacttctttgtgatgtgtgcgttcaactcacagtgtttaacctttcttttcatagagcagttaggaaacactctgtttgtaaactctgcaagtggatattcagacctctttgaggccttcgttggaaacgggatttcttcatactgtgctagacagaagaattcccagtaacttccttgtgttgtgtgtgttcaactcacagagttgaactttcatttacacagagcagatttgaaacactctttttgtggaatttgcaagtggagatttcaagcgctttgaggtcaaaggcagaaaaggaaatatcttcgtttcaaaactagacagaatcattctctgaaactgctgcgtgatgtgttcgttcaactctcagagtttaacttttcttttcattcagcggtttggaaacactctgtttgtaagtctgcacgtggatattttgaccacttagacgccttcgttggaaacgggtttttttcatgtaaggctagacagaagaattcccagtaacttccttgtgttgtgtgcattcaactcacagagttgaacgttcccttagacagagcagatttgaaacactctatttgtgaaatttgcaagtgtagatttcaagcgctttaaggtcaatggcagaaaaggaaatatcttcgtttcaaaactagacagaatcattcccacaaactgcgttgttatgtgttcgttcaactcacagagtttaacctttctgttcatagagcagttaggaaacactctgtttgtaaagtctgtaagtggatattctgacatcttgtggccttcgttggaaaagggatttcttcatattctgctagacagaataattctcagtaacttccttgtgttgtgtgtattcaactcacagagttgaacgatcctttacagagagcagacttgaaacactctttttgtggaatttggaagtggagatttcagccgctttgaggtcaaaggtagaataggaaatatcttcctacagaaaatagacagaatgattctcagaaactcctttgtgatgtgtgtgttcaactcacagagtttaacctttcttttcatagagcagttagtaaacactctgtttataaagtctgcaagtggatattcagacccctttgaggccttcgttggaaacgggattgcttcatattatgctagacagaagaattctcagtaacttcccttgtgttgtgtgtattcaactgacagagttgaactttcatttagagagagcagatttgaaacactgtttttgtggaatttgcaaatggagatttcaagcgctttggggccaaaggcagaaaaggaaatatcttcgtataaaaactagacagaatcattctcagaaactgctctgcgatgtgtgcgttcaactctcagagtttaacttttcttttcattcaacagtttggaaacactctgtttgtaaagtctgcacgtggatattttgaccacttagaggccttcgttggaaacgggtttctttcctgtaaggctagacagaagaattcccagtaacttccttgtgttgtgtgcattcaactcacggagttgaacgttccctaagacagagcagatttgaaacactctatttgtgcaatttgcaagtgtagatttcaagcgctttaaggtcaacggcagaaaaggaaatatcttcgtttcaaaactagacagaatcattcccacaaactgcgttgtgatgtgttcgttcaactcacagagtttaacctttcttttcatagagcagttaggaaacactctgtttgtaaactctgcaagtggatattcagacctctttgaggccttcgatggaaacgggatttctccatactatgctagacagaagaattctcaataacttccttgtgttgtgtgtattcaactcacagagttgaacgatcctttacacagagcagacttgaaacactcttgttgtggaatttgcaggtggagatttcagcctctttgaggtcaatggtagaataggaaatatcttcctatagaaactagacagaatggttctcagaaactcctttgtgatgtgtgtgttgaactcacagagtttaacctttcttttcatagagcagttagtaaacactctgtttataaagtctgcaagtggatattcagacccctttgaggccttcgttggaaacgggatttcttcatattatgctagacagaagaattctcagtaacttccttgtgttgtgtgtattcaactgacagagttgaactttcatttagagagagcagatttgaaacactctttttgtggaatttgcaagtggagatttcaagtgctttggggccaaaggcagaaaaggaaatatcttcgtataaaaactagacagaatcattctcagaaactgctgcgtgatgtgtgcgttcaactctcagagtttaacttttcttttcattcagcagtttggaaacactctgtttgtaaagtctgcacgtggaaattttgaccacttagaggccttcgttggaaacgggtttttttcatgtaaggctagacagaagaattcccagtaacttccttgcgttgtgtacattcaactcacagagttgaacgttcccttagacagagcagatttgaaacactctttttgtgcaattggcaagtggagatttcaagcgctttaaggtcaatggcagaaaaggaaatatcttcgtttcaaaactagacagaatgattctcagaaactcctttatgatgtgtgcgtttaactcacagagtttaacctttcttttcattgagcagttaggaaacactctgtttgtaaagtctgcaagaggatattctgacctccttgaggccttcgttggaaacgggatttcttcatattctgctagacagaagaattctcagtgacttccttgtgttgtgtgtattcaactcacagatttgaacgatcctttacacagagcagacttgaaacactctttttgtggaatttgcaagtgcagatttcagccaatttgaggtcaatggtagaaaaggaaatatcttcgtataaagactagacagatgattctcagaaactcctttgtgatgtgtgcgttcaactcacagagtttaacccttctgttcatagagcagttaggaaacactctgtttgtaaagtctgcaagtggatattcagacctccttgaggccttcggtggaaaagggatttcttcatattctgctagacagaagaattctcagtaacttccttgtgttgtgtgtattcaactcacagagttgaacgatactttacacagagcagacttgaaacactcgttttgtggaatttgcaagtggagatttcagccgcgttgaggtcaatggtagaaaaggaaatatcttcgtataaaaactagacagaatcattctcagaaactgctctgcgatgtgtgcgttcaactctcagattttaacttttcttttcattcagcagtttggaaacactctgtttgtaaagtctgcacgtggatattttgaccacttagaggccttcgttggaaacgggtttttttcctgtaaggctaaacagaagaattctcagtaacttccttgtgttgtgtgtattcaactcacagatttgaacgatcctttacagagagcagacttgaaacactgtttttgtggaatttgcaagtggagatttcagccgctttgaggtcaatggtagaataggaaatatcttcctatagaaactagacagaatgattctcataaactcctttgtgatgtgtgcgttcaacacacagagtttaacctttctgttcatagagcagttaggaaacactctgtttgtaaagtctgtaagtggatattctgacatcttgtggccttcgttggaaacgggatttcttcatattctgctagacagaagaattctcagtaacttccttgtgttgtgtgtattcaactcactgagttgaacgatcctttacacagagcagacttgaaacactctttttgtggaatttgcaagtggagatttcagccgctttgaggtcaatggtagaaaaggaaatatcttcgtataaaaactagacagaatgattctcagaatctcctttgtgatgtgtgcgttcaactcacagagtttaacctttcttttcatagagcagttaggaaacactctgtttgtaaagtctgcaagtggatattcagtcctctttgaggccttcgttggaaacgggtttttttcatataaggctagacagaagaattcccagtaactttccttgtgatgtgtgtgttcaactcacagagttgaactttcatttacacagagcacatttgaaacactctttttgtggaatttgcaagtggagatttcaagcgctttgaggccaaaggcagaaaaggaaatatcttcgtataaaaactagacagaatcattctcagaaactgctctgcgatgtgtgcgttcaactctcagagtttaacttttcttttcattcagcagtgtggaaaaactctgtttgtaaagtctgcacgtggatattctgaccacttagaggccttcgttggaaacgggtttttttcctgtaaggctagacagaagaattctcagtaacttccttgtgttgtgtgtattcaactcacagagttgaactgatcctttacacagaacagtcttgaaacactctttttgtggaatttgcaattggagatttcagccgctttgaggtcaatggtagaataggaaatatcttcctatagaaactagacagaatgattctcagaaactcctttgtgatgtgtgcgttcaactcacagagtttaacctttcttttcatagagcagttaggaaacactctgtttgaaaagtctgcaagtggatattcagacctccttgaggccttcgttggaaacgggatttcttcatattatgctagacagaagaattctcagtaacttccttgtgttgtgtgtattcaactcacagagttgaacgatcctttccacagagcagacttgaaacactctttttgtggaatttgcaagtggagatttcagccgctttgaggtcaatggtagaaaaggaaatatcttcgtataaagactagacagagtgattctcagaaactcctttgtgatgtctgcgtttaactcacagagtttaaccattcttttcatagagcagttaggaaacactctgtttgtaaagtctgcaagtggatattcagacctccttgaggccttcgttggaaacgggatttcttcatattatgctagactgaagaattcccagtaacttccttgtgttgtgtgtgttcaactcacagagttgaactttcatttacacagagtagatttgaaacactctttttgtggaatttgcaagtggagatttcaagcgctttgaggctaaaggcagaaaaggaaatatcttcgtataaaaactagacagaatcattctcagaaactgctctgcgatgtgtgcgttcaactctcaagagtttaacttttcttttcattcagaagtttggaaacactctgtttgtaaagactgcacgtggatattttgaccacttagaggccttcgttggaaacgggtttttttcatgtaaggctagacagaagaattctcagtaacttcctcgtgttgtgtgtattcaactcacagagttgaacgatcctttacacagagcagacttgaaacactctttttgtggaatttgcaagtggagatttcagccgctttgatgtcaatggtacaaaaggaaatatcttcgtataaagactagacagaatgattttcagaaactcttttgtgatgtgtgcgttcaactcacagagtttaacctttctgttcatagagcagttaggaaacactctgtttgtaaagtctgcaagtggatattcagacctccttgagaccttcgttggaaacgggatttcttcatattctgctagacagaagaattctcagtaacttccttgtgttgtgtgtattcaactcacagagttgtacgatcctttacacagagcagacttgaaacactcttgttgtggaatttgcaagtggagatttcagccactttgaggtcaatgctagaaaaggaaatatcttcgtataaagactagacagaatgattctcagaaactcctttgtgatgtgtgggttcaactcacagagtttaacctttcttttcatagagcagttaggaaacactctgtttgtaaagtctgcaagtggatattcagacctctttgaggccttcgttggaaacgggtttttttcatataaggctagacagaagaattctcagtaacttccttgtgttgtgtgtattcaactgacagagttgaactttcatttagacagagcagatttgaagcactgtttttgtggaatttgcaagtggagatttcaagcgctttgaggccaaaggcagaaaacgaaatatcttcgtataaaaactagacagaatcattctcagaaactgctctgcgatgtgtgcgttcagctctcagagtttaacttttcttttcattcagcagtttggaaacactctgtttgtaaagtctgcacgtggatattttgaccacttagaggccttcgttggaaatgggtttttgtcatgtaaggctagacagaagaattcccagtaacttccttgtgttgtgtgtgttcaactcacagagttgaactttcatttacacagagcagatttgaaacactctttttgtggaatttgcaaatggagatttcacccgcgttgaggtcaatggtagaaaaggaaatatcttcgtttcaaaactagacagaatgattctcagaaactcctttgtgatgtgtgcgttcaactcacagagtttaacctttctgttcatagagcagttaggaaacactctgtttgtaaagtctgtaagtggatattctgacatcttgtggccttcgttggaaacgggatttcttcatattctgctagacagaagaattctcagtaacttccttgtgttgtgtgtattcaactcacagtgttgaacgatcctttacacagagcagacttgaaacactctttttgtggaatttgcaagtgtagatttcaagcgctttaaggtcaatggcagaaaaggaaatatcttcgtatcaaaactagacagaatgattctcataaactcctttgtgatgtgtgcgttcaactcacagagtttaacctttcttttcatagagcagttaggaaacactctgtttataaagtctgcaagtggatattcagacctccttgaggccttcgttggaaacgggatttcttcatattctgctagacagaagaattcccagtaacttccttgtgttgtgtgtgttcaactcgcagagttgaactttcatttacacagagcagatttgaaacactctttttgtggaatttgcaaatggagatttcaagcgctttgaggccaaaggcagaaaaggaaatatcttcgtataaaaactagacagaatcattctcagaaactgctctgcgatgtgtgtgttcaactctcacagtttaacttttcttttcattcagcagttaggaaacactctgtttgtaaagtctgcacgtggataatttgaccacttagaggccttcgttggaaacgggtttttttcatgtaaggctagacagaagaattcccagtaacttccttgtgttgtgtacattcaactcacagagttgaacgttcccttagacagagcagatttgaaacactctttttgtggaatttgcaagtggagatttcagccgctttgaggtcaatggtagaaaaggaaatatcttcgtataaaaactagacagaaatgattctcagaaaatcttttgtgatgtgtgcgttcaactcacagagtttaacttttcttctcatagagcaggtaggaaacactctgtttgtaaagtctgcaagtggatattcagacctctttgaggccttcgttggaaacgggatttcttcatattatgctagacagaataattctcagtaacttccttgtgctgtgtgtattcaactcacagagttgaaggatcctttacagagagcaggcttgaaacactctttttgtcgaatttgcaagtggagatttcagccgctttgaggtcaatggtagaataggaaatatcttcttatagaaactagacagaatgattctcataaactcctttgtgaagtgtgcgttcaactcacagagtttaacctttcttttcatagagcagttaggaaacactctgtttgtaaaggcggcaagtggatattcagacctccttgaggccttcgttggaaacaggatttcttcatattctgctagacagaagaattctcagtaacttccttgtgttgtgtgtattcaactgacagagttgaactttcatttagagagagcagatttgaaacactgtttttgtggaatttgcaagtggagatttcaagcgctttgtggccaaaggcagaaaaggaaatatcttcctataaaaactagacagaatcattctcagaaacagctctgcgatgtgtgcgttcaactctcagagtttaacttttcttttcattcagcagtttggaaacactctgtttgtaaagtctgcacgtggatattttgaccacttagaggccttcgttgcaaacgggtttttttcctgtaaggctagacagaagaattcccagtaacttccttgtgttgtgtgcattcaactcacagagttgaacgtccccttagacatagcagatttgaaacactctatttctgcaatttgcaagtgtagttttcaagctctttaaggtcaacggcagaaaaggaaatatcttcgtttcaaaactagacagaatcattcccacaaactgcgttgtgatgtgttcgttcaacttacagagtttaacctttctgttcatagagcagttaggaaacactctgtttgtaaagtctgaaagtggatattctgacatcttgtggccttcgttggaaacgggatttcttcatattctgctagacagaagaattctcagtaacttccttgtgttgtgtgtattcaactcacagagttgaatgatcctttacacagaacagtcttgaaacactctttttgtggaatttgcaagtggagatttctgccgctttgaggtcaatggtagaataggaaatatcttcctatagaaactagacagaatgattctcataaactcctttgtgatgtgtgcgttcaactcacaaagtttaacttttcttttcatagagcagttaggaaacactctgtttgtaaagtctgcaagtggatattcagaactctttgaggccttcgttggaaacgggatttcttcatattatgctagacagaagaattctcagtaacttccttgtgttgtgtgtattcaactgacagagttgaactttcatttagagagagcggatttgaaacactgtttttgtggaatttgcaagtggagatttcaagcgctttggggccaaaggcagaaaaggaaatatcttcgtataaaaactagacagaatcattctcagaaactgctgcgtgatgtgtgcgttcaactctcagagtttaacttttcttttcattcagcggtttggaaacactctgtttgtaaagtctgcacgtggaaattttgaccacttagaggccttcgtggaaacgggtttttttcatgtaaggctagacagaagaattcccagtaacttccttgtgttgtgtgcattcaactcacagagttgaacgttcccttagacagagcagatttgaaacactctatttgtgcaatttgcaagtgtagatttcaagcgctttaaggtcaatggcagaaaaggaaatatcgtcgtttcaaaattagacagaatcattcccacaaactgcgttgtgatgtgttcgttcaactcacagagtttaacctttctgttcatagagcagtgaggaaacactctgtttgtaaagtctgtaagtggatattctgacatcttgtggccttcgttggaaacgggatttcttcatattctgctagacagaagaattctcagtaacttctttgtgttgtgtgtattcaactcacagagttgaacgatcctttacacagagcagacttgaaacactctttttgtggaatttgcaagtggagatttcagccgctttgaggtcaatggtagaataggaaatatcttcatatagaaactagacagaatgtttctcagaaactcctttgtgatgtgtgcgttgaactcacagagtttaacctttcttttcatagagcagttaggaaacactctgtttgtaaagtctgcaagtggatattcagacatcgttgaggctttcgttggaaacgggatttcttcatattctgatagaaagaagaattctcagtaacttccttgtgttgtgtgtattcaactcacagagttgaatgatcctttacacagaacagtcttgaaacactctttttgtggaatttgcaagtggagatttcagccgctttgaggtcaatggtagaataggaaatatcttccaatagaaactagacagaatcattctcagaaactgctctgcgatgtgtgcgttcaactctcagagtttaacttttcttttcattcagcagtttggaaacactctgtttgtaaagtctgcacgtggatattttgaccacttagaggccttcgttggaaacggatttttttcctgtaaggctagacagaagaattcccagtaacttccttgcgttgtgtacattcaactcacagagttgaacgttcccttagacagagcagatttgaaacactctttttgtgcaattggcaagtggagatttcaagcgctttaaggtcaatggcagaaaaggaaatatcttcgtttcaaaactagacagaatcattcccacaaactgcgttgtgatgtgttcgttcaactcacagagtttaacttttcttttcatagagcagttaggaaacagtctgtttgtcaattctgtaagtggatattctgacatcttgtggccttcgttggaaacgggatttcttcatattctgctagacagaagaattctcagtaacttccttgtgttgtgtgtattcaactcacagagttgaatgatcctttacacagatcagtcttgaaacactctttttgtggaatttgcaagtggagatttcagccgctttgaggtcaatggtagaataggaaatatcttcctatagaaactagacagaatgattctcagaaactcctttgtgatgtgtgcgttcaactcacagagtttaacctttcttttcatagagcagttaggaaacacactgtttgtaaagtctgcaagtggatattcatacctctttgaggccttcgttgaaaacgggatttcttcatattctgctagagagaagaattctcagtaacttccttgtgttgtgtgtattcaactcacagagttgaacgatcctttacacagagcagacttgaaacactctttttgtggaatttgcaagtggagatttcaagcgctttgaggccaaaggcagaaaaggaaatatcttcgtacaaaaactagacagaatcatactcagaaactgctctgcaatgtgtgcgttcaactctcagagtttaacttttcttttcattcagcagtttggaaacactctgtttgtaaagtctgcacgtggatattttgaccacttagtggcctttgttggaaacggttttttttcctgtaaggctagacagaagaattcccagtaacttccttgtgttgtgtacattcaactcacagagttgaacgttcccttagacagagcagatttgaaacactctttttgtgcaattggcaaatggagatttcaagcgctttaaggtcaatggcagaaaaggaaatatcgtcgtttcaaaactagacagaatcattcccacaaactgcgttgtgatgtgttcgttcaactcacagagtttaacctttcttttcatagagcagttaggaaacagtctgtttgtcaattctgtaagtggatattctgacatcttgtggccttcgttggaaacgggatttcttcatattccgctagacagaagaattctcagtaacttccttgtgttgtgtgtattcaactcacagagttgaacgatcctttacacagagcagacttgaagcaccctttttgtggaatttgcaagtggagatttcagccgctttgaggtcaatggtagaaaaagaaatatcttcgtataaaaactagacagaatgattctcagaaactcctttgtgatgcgtgcgttcaactcacagagttcaacctttcttttcatagagcagttgggaaacactctgtttgtaaagtctgcaagtggatattcagacttctttgaggccttcgttggaagcgggatttcttcatattctgctagacagaagaattcccagtaacttccttgtgttgtgtgtgttcaactcacagagttgaactttcatttacacagagcagatttgaaacactctttttgtggaatttgcaagtggagattttaagggctttgaggccaaaggcagaaaaggaaatatcttcgtataaaaactagacagaatcattctcagaaactgctctgcgatgtgtgcgttcaactctcagagtttaactcttcttttcattcagctgtttggaaacactctgtttgtaaagtctgcacgtggataatttgactacttagaggccttcgttggaaacgggtttttttcctgtaaggctagacagaagaattcccagtaacttccttgtgttgtgtgcattcaactcacagagttgaacgttcccttagacagagcagattcgaaacactctatttgtgcaatttgcaagtgtagatttcaagcgctttaaggtcaatagcagaaaaggaaatatcttcgtttgaaaactagacagaatcattcccacaaactgcgttgtgatgtgtgcgttcaactcacagagtttaacttttcttttcatagagcagttaggaaacactctgtttgtaaagtctgcaagtggatattcagacctctttgaggccttcgttggaaacgggatttcttcatattctgctagacagaagaattctcagaaacttccttgtgttgtgtgtattcaactcacagagttgaacgatcctttacacagagcagacttgaaacactctttttgtggaaattgcaagtggagatttcaggcgctttgaggtcaatggtagaaaaggaaatatcttcgtataaaaactagacagaatgattctcagaaaatcttttgtgatgtgtgcgttcaactcacagagtttaacttttcttctcatggagcagttaggaaacactctgtttgtaaagtctgcaagtggatattcagacccctttgaggccttcgttggaaacgggatttcttcatattctgctagacagaagaattcccagtaacttccttgtgttgtgtgtattcaactcacagagttgaacgatcctttacacagagaggacttgaaacactctttttgaggaatttgcaagtggagatttcagccgctttgaggtcaatggtagaaaaggaaatatcttcgtataaaaactagacagaatgattctcagaaacttctttgtgatgtgtgcgttcaactcacagagtttaacctttcttttcatagagcagttaggaaacactctgtttgttaagtctgcacgtggatacttggacttctttgaggccttcgttggaaacgggtttttttcatgtaaggctggacagaagaattcccagtaacttccttgtgttgtgtacattcaactcacagagttgaacgttcccttagacagagcagatttgaaacactctttttgtgcaattggcaaaaggagatttcaagcgctttacgttcaatggcagaaaaggaaatatcttcgtttcaaaactagacagaatcattcccacaaactgcgttgtgatgtgttcgttcaactcacagagtttaacctttcttttcatagagcagttaggaaacagtctgtttgtaaattctgtaagtggatattctgacatcatgtggccttcgttggaaacgggatttcttcatattctgctagacagaagaattctcagaaacttcgttgtgttgtgtgttttcaactcacagagttcaacgatcctttacacagagcagacttgaaacactctttttgtggaatttgcaagtggagatttcagccattttgaggtcaacgttagaaaaggaaatatcttcgtataaaaactacacagaatgattctcagaaactcctttgtgatgtgtgcgttcaactcacagagttcaacctttcttttcatagagcagttgggaaacactctgtttgtaaagtctgcaagtggatattcagacttctttgaggccttcgttggaaacgggatttcttcatattctgctagacagaagaattcccagtaacttccttgtgttgtgtgtgttcaactcacagagttgaactttcatttacacagagcagatttgaaacactctttttgtggaatttgcaagtggagatttcaagcgctttgaggccaaaggcagaaaaggaaatatcttcgtatcaaaactagacagaatcattctcagaaactgctctgcgatgtgtgcgttcaactctcagaagtttaacttttcttttcattcagcagtttggaaacactctgtttgtaaagtctgcacgtggataacttgaccacttagaggccttcgttggaaacgggtttttttcatgtaaggctagacagaagttttcccagtaacttccttgtgttgtgtacattcaactcacagagttgaacgttcccttagacagagcagatttgaaacactctttttgtgcaattggcaaatggagatttcaagcgctttaaggtcaatggcagaaaaggaaatatcttcgtttcaaaactagacagaatcattcccacaaactgcgttctgatgtgttcgttcaactcacagagtttaacctttctgttcatagagcagttaggaaacactctgtttgtaaagtctgtaagtggatattctgacatcttgtggccttcgttggaaacgggatttcttcatattctgctagacagaagaattctcagtaacttccttgtgttgtgtgtattcaactcacagagttgaacgatcgtttacacagagcagacttgaaacattctttttctggaatttgcaagtggagatttcagccgctttgaggtcaatggtagaataggaaatatcttcctatagaaactagacagaaatgattctcagaaactcctttgtgatgtgtgcgttcaactcacagagtttaacctttcttttcatagagcagttaggaaacactctgtttgtaaagtctccaagtggatattcagacctctttgaggccttcgttggaaacgggtttttttcatataaggctagacagaagaattctcagtaacttccttgtgttgtgtgtattcaactgacagagttgaacgatcctttacacagagcagacttgaaacactctttttgtggaatttgcaaggggagatttcaagcgctttggggccaaaggcagaaaaggaaatatcttcgtataaaaactagacagaatcattctcagaaactgctctgcgatgtgtgcgttcaactctcagagtttaaattttcttttcattcagcagtttggaaacactctgtttgtaaagtctgcacgtggatattttgaccacttagaagccttcgttggaaacgggtttctttcctgtaaggctagacagaagaattcccagtaacttccttgtgttgtgtacattcaactcacagagttgaacgttcccttagacagagcagatttgaaacactctttttgtgcaattggcaaatggagatttcaagcgctttaagttcaatggcagaaaaggaaatatcttcgtttcaaaactagacagaatcattcccacaaactgcgttgtgatgtgttcgttcaactcacagagtttaacctttctgttcatagagcagttaggaaacactctgtttgtaaagtctgtaagtggatattctgacatcttgtggccttcgttggaaacgggatttcttcatattatgctagacagaagaattctcagtaacttccttgtgttgtgtgtattcaactcacagagttgaacgatcctttacacagagcagacttgaaacactctttttgtggaattggcaagtggagatttcagccgctttgaggtcaatggtagaataggaaatatcttcctatagaaactagacagaatgattctcagaaactcctttgtgatgtgtgcgttcaactcacagagtttaacctttcttttcatagagcagttaggaaacactctgtttgtaaagtctgcaagtggatattcagacttctttgaggccttcgttggaaacgggtttttttcatataaggctagacagaagaattcccagtaacttccttgagttgtgtgtattcaactcacagagttgaactttcatttacacagagcagatttgaaacactctttttgtggaatttgcaaatggagatttcaagtcctttcaggccaaaggcagaaaaggaaatatcttcgtatgaaaactagacagaatcattctcagaaactgctctgcgatgtgtgcgttcaactctccgagtttaacttttcttttcattcagcagtttggaaacactctgtttgtaaagtctgcacgtggataatttgaccacttagaggccttcgttggaaacggtttttttttcatgtaaggctagacagaagaattcacagtaacttccttgtgttgtgtacattcaactcacagagttgaacgttcccttagacagagcagatttgaaacactctttttgtgcaattggcaagtggagatttcaagcgctttaaggtcaatggcagaaaaggaaatatcttcctttcaaaactagacagaatcattcccacaaactgcgttgtgatgtgttcgttcaactcacagagtttaacctttcttttcatagagcagttaggaaacagtctgtttgtaaattctgtaagtggatattctgacatcttgtggccttcgttggaaatgggatttcttcatattctgctagacagaagaattctcagaaacttccttgtgttgtgtgtcttcaactcacagagttgaacgatgctttacacagagtagacttgaaacactctttttgtggaatttgcaagtggagatttcaggcgctttgaggtcaatggtagaaaaggaaatatcttcgtataaaaactagacagaatgattctcataaactcctttgtgatgtgtgcgttcaactcacagagtttaacttttcttttcatagagcagttaggaaacactctgtttgtaaagtctgcaagtggatattcagacctctttgaggccttctttggaaacgggatttcttcatattatgctagacagaagaattctcagtaacttccttgtgttgtgtgtattcaactcacagagttgaatgatcctttacacagaggagacttgaaacactctttttgtggaatttgcaagtggagatttcagccgctttgaggtcaatagtagaaaaggaaatatcttcgtagaaaaactagacagaatgattctcagaaactcctttgtgatgtgtgtgttcaactcacagagtttaacctttcttttcatagagcagttaggaaacactctgcttgtaaagtctgcaagtggatattcagacctcgttgaggccttcgttggaaacgggatttcttcatattctgctagacagaagaattctcagtaacttccttgtgttgtgtttatgcaactcacagagttgaatgatcctttacacagagcagacttgaaacactctttttgtggaatttgcaagtggagatttcagccgctttgtggtcaatggtagaaaaggaaatatcttcgtataaagactagacagaatcattctcagaaactgctctgcgatgtgtgcgttcaactctcagtgtttaacttttcttttcattcagcagtttggaaacactctgtttgtaaagtctgcacgtggataatttgaccacttagagattttcgttggaaacgggtttttttcatgtaaggctagacagaagaattcccagtaacttccttgtgttgtgtacattcaactcacagagttgaacgttcccttagacagagcagatttgaaacactctttttgggcaattggcaagtggagattacaagcgctttaaggtcaatggcagaaaaggaaatatcttcgtttcaaaactagacagaatcattcccacaaactgcgttgtgatgtgttcgttcaactcacagagtttaacctttcttttcatagagcagttaggaaacactctgttggtaaattctgtaagtggatattctgacatcttgtggccttcgttggaaacgggatttctaaatattctgctagacagaagaattctcagtaacttccttgtgttgtgtttattcaacgcacagagttgaatgatcctttacgcagagcagacttgaaacactctttttgtggaatttgcaagtggagatttcagccgctttgaggtcaatggtagaaaagtaaatatcttcgtataaagactagacagaatgattctcagaaaatcttttgtgatgtgtgcgttcaactcacagagtttaacttttcttctcatagagcagttaggaaacactctgtttgtaaagtctgcaagtggatattcagacctctttgaggccttcgttggaaacgggatttcttcatattctgctagacagaagaattctcactaacttccttatgttgtgtgtattcaactcacagagttgaaggatgctttacagagagcaggcttgaaacactctttttgtcggatttgcaagtggagatttcagccgctttgaggtgaatggtagaataggaaatatcttcttatagaaactagacagaatcattctcagaaactcctttgagatgtgtgcgttcaactctcagagtttaacttttcttttcattcagcagtttggaaacactctgtttgtaaagtctgcacgtggatattttgaccacttagaggccttcgttggaaacgggtttctttcctgtaaggctagacagaagaattcccagtaacttccttgtgttgtgtgcattcaactcacagagttgaacgttcccttagacagagcagatttgaaacactctatttgtccaatttgcaagtgtagatttcaagcgctttaaggtcaacggcagaaaaggaaatatcttcgtttcaaaactagacagaatcattcccacaaactgcgttgtgatgtgttcgttcaactcacagagtttaacctttcttttcatagagcacttaggaaacagtctgtttgtaaattctgtaagtggatattctgacatcttgtggccttcgttggaaacgggatttcttcatattctgctagacagaagaattctcagtaacttccttgtgttgtgtgtattcaactcacagagttgaacgatcctttacacagagcagacttgtaacactctttttctggaatttgcaagtggagatttcagccgctttgaagtcaaaggtagaaaaggaaatatcttcctataaaaactagacagaatgattctcagaaacttctttgtgatgtgtgcgttcaactcacagagtttaacctttctattcatagagcagttaggaaacactctgtttgtaaactctgcaagtggatattcagacctctttgaggccttcgatggaaacgggatttctccatactatgctagacagaagaattctcagtaatttccttgtgttgtgtgtattcaactcacagagttgaacgatcctttacacagagcagacttgaaacactctttttgtggaatttgcaagtggagatttcagccgctttgaggtcaatggtagaaaaggaaatatcttcgtataaaaactagacagaatcattctcagaaactgctctgggatgtgtgcgttcaactctcagagtttaacttttcttttcattcagcagtgtggaaacactctgtttgtaaagtctgcacgtggatattttgaccacttagaggccttcgttggaaacgggtttttttcctgtaaggctagacagaagaattcccagtaacttccttgtgttgtgtacattcaactcacagagttgaacgttaccttagacagagcagatttgaaacactctttttgtgcaattggcaaatggagatttcaagcgctttaaggtcaatggcagaaaaggaaatatcttcgtttcaaaactagacagaatcattcccacaaactgcgttgtgatgtgttcgttcaactcacagagtttaacctttctgttcatagagcagttaggaaacactctgtttgtaaagtctgtaagtggatattctgacatcttgtggccttcgttggaaacgggatttcttcgtattctgctagacagaagaattctcagtaaattccttgtgttgtgtgtattcaactcacagagttgaacgatcctttacacagagcggacttgaaacacactttttgtggaatttgcaagtggagatttcagccgcgttgaggtcaatggtagaaaaggaaatatcttcgtataaaaactagacagaatgattctcagaaactcctttgtgatgtgtgcgtgcaactcacagagtttaacttttcttttcatagagcagttaggaaacactctgtttgtaaagtctgcaagtggatattcagacctctttgaggccttcgttggaaacgggatttcttcatattatgctagacagaagaattcccagtaacttccttgtgttgtgtgtgttcaactcacagagctgaactttcatttacacagagcagatttgaaacactctttttgtggaatttgcaaatggagatttcaagcgctttgaggccaaaggcagaaaaggaaatatcttcgtttcaaaactagacggaatcattctcagaaactgctctgcgatgtgtgcgttcaactctcagagtttaacttctcttttcattcagtagtttggaaacactctgtttgtaaagtctgcacgtggataacttgaccacttagaggccttcgttggaaacgggtttttttcatgtaaggctagacagaagaattcccagtaacttccttgtgttgtgtacattcaactcacagagttgaacgttcccttagacagagcagatttgaaaaactctttttgtgcaattggcaagtggagatttcaagcgctttaaggtcaatggcagaaaaggaaatatcttcgtttcaaaactagacagaatcattcccacaaactgcgttgtgatgtgttcgttcaactcacagagtttaacctttcttttcatagagcagttaggaaatagtctgtttgtaaattctgtaagtggatattctgacatcttgtggccttcgttggaaacgggatttcttcatattctgctagacagaagaattctcagtaacttccttgtgttgtgtgtattcaactcacagggttgaacgatcctttatacagagcagacttgaaacactctttttgtgggacttgcaagtggagatttcagccgctttgaggtcaataatagtaaaggaaatatcttcgtagaaaaactagacagaatgattctcagaaactcctttgtgatgtgtgcgttcaactcacagagtttaacctttcttttcatagagcagttaggaaacactctgtttgtaaagtctgcaagtggatattcagacctccttgaggccttcgttggaaatgggatttcttcatattatgctagacagaagaattctcagtaacttccttgtgttgtgtgtattcaactcacagagttgaacgatcctttacacagagcatacttgaaacactcttgttgtggagtttgcaagtggagatttcagccgctttgaggtcaatggtagaataggaaacatcttcctatagaaactagacagaatcattctcagaaactgctctgcgatgtgtgcgttcaactctcagagtttaacttttcttttcattcagcagtttggaaacactctctttgtaaagtctgcacgtggatattttgaccatttagaggccttcgttggaaacgggtttttttcctgtaaggctagagagaagaattcccagtaacttccttgcgttgtgtacattcaactcacagagttgaacgttcccttagacagagcagatttgaaacactctttttgtgcaattggcaagtggagatttcaagcgctttaaggtcaatggcagaaaaggaaatatcttcgtttcaaaactagacagaatcattcccacaaactgcgttgtgatgtgttcgttcaactcacagagtttaacctttcttttcatagagcagttaggaaacagtctgtttgaaaattctgtaagtggatattctgacatcttgtggccttcattggaaacgggatttcttcatattctgctagacagaagaattctcagtaacttccttgtgttgtgtgtattcaactcacagaattgaacgatcctttacacagagcagacttgaaacattctttttgtggaatttgcaagtggagatttcagccgctttgaggtcaatggtagaataggaaatatcttcctatagaaaatagacagaatgattctcagaaaatcttttgtgatgtgtgcgttcaactcacagagtttaacttttcttctcatagagcagttaggaaacactctgtttgtatagtctgcaagtggatattcagacctctttgaggccttcgttggaaacgggatttcttcatattatgctagacagaagaattctcggtaacttccttgtgttgtgtgtattcaactgacagagttgaactttcatttagagagagcagatttgaaacactgtttttgtggaatatgcaagtggagatttcaagcgctttggggccaagggcagaaaaggaaatatcttcgtttaaaaactagacagaatcattctcagaaactgctgcgtgatgtgtgcgttcaacgctcagagtttaactattcttttcattcagcggtttggaaacactctgtttgtaaagtctgcacgtggatattttgaccacttagacgccttcgttggaaacgggtttttttcatgtaaggctagacagaagaattcccagtaacttccttgtgttgtgtacattcaactcacagagttgaacgttcccttagacagagcagatttgaaacactctttttgtgcaattggcaagtggagatttcaagcgatttaaggtcaatggcagaaaaggaaatatcttcgtttcaaaactagacagaatcattcccacaaactgcgttgtgatgtgttcgttcaactcacagagtttaacctttctgttcatagagcagttaggaaacactctgtttgaaaagtctgcaagtggatattcagacctccttgaggccttcgttggaaacgggatttcttcatattctgctagaccgaagaattctcagaatcttccttgtgttgtgtgtattcaactcacacagttgaacgatggtttacacagagcagatttgaaacactctttttgtggaatttgcaagtggagatttcagccgcgttgaggtcaatggtagaaaaggaaatatcttcgtataaaaactagacacaacgattctcagaaacttctttgtgatgtgtgcgttcaactcacagagtttaacctttcttttcatagagcagttaggaaacactctgtttgtaaactctgcaagtggatattcagacctgtttgaggccttcgttggaaacgggatttcttcatactatgctagacagaagaattcccagtaacttccttgtgttgtgtgtgttcaactcacagagttcaactttcatttacacagagcagatttgaaacactctttttgtggaatttgcaagtggagatttcaagcgctttgaggccaaaggcagaaaaggaaataccttcgtataaaaactagacagaatcattctcagaaactgctctgcgatgtgtgcgttcaactctcagaagtttaacttttcttttcattcagcagtttggaaacactctgtttgtaaagtctgcacgtggataacttgaccacttagaggccttcgttggaaacgggtttttttcctgtaaggctagacagaagaattcccagtaacttccttgtgttgtgtacattcaactcacagagttgaacgttcccttagacagagcagatttgaaacactctttttgtgcaattggcaagtggagatttcaagcgctttgaggtcaatggcagaaaaggaaatatcttcgtttcaaaactagacagaatcattcccacaaactgcgttgtgatgtgttcgttcatctcacagagtttaacctttcttttcgtagagcagttaggaaacagtctgtttgtaaattctgtaagtggatattctgacatcttgtggccttcgttggaaatgggatttcttcatattctgctagacagaagaattctcagaatcttccttgtgttgtgtgtattcaactcacagagttgaacgatggattacacagagcagatttgaaacactctttttgtggaatttgcaagtggagatttcagccgctttgaggtcaatggtagaaaaggaaatatcttcgtataaaaactagacagaatgattctcagaaactcctttgtgatgtgtgcgttcaactcacagagtttaacctttcttttcatagagcagttaggaaacactgtgtttttatagtctgcaagtggatattcagacatctttgaggccttcgttggaaacgggatttcttcatattctgctatacagaagaattctcagaaacttcctagtgttgtgtgttttcaactcacagagttgaacgatgctttacacagagtagacttgaaacactctttttgtgtaatttgcaagtggagatttcagccgctttgaggtcaatggtagaaaaggaaatatcttcgtataaaaactagacagaatgattgtcagaaactcctttgtgatgtgtgcgttcaactcacagagtttaacctttcttttcatagagcagttaggaaacactctgtttgtaaagtctgcaagtggatattcagacatctttgaggctttcgttggaaacgggatttcttcatattctgctatacagaagaattcccagtaacttccttgtgttgtgtgtgttcaactcacagagttgaactttcatttacacagagcagatttgaaacactctttttgtggaatttgcaagtggagatttcaagcgctttgaggtcaatggcagaaaaggaaatatcttcgtttcaatctagacagaatcattcccacaaactgcgttgtgatgtgttcgttcaactcacagagttttacctttctgttcatagagcagttaggaaacactctgtttgtaaagtctgtaagtggatattctgacatcttgtggccttcgttggaaaagggatttcttcatattctgctagacagaagatttctcagtaacttccttgtgttgtgtgtattcaactcacagagttgaacgatcctttacacagagcagacttggaacactctttttgtggaatttccaagtggagatttcagccgcgttgaggtcaatggtagaaaaggtaatatcttcgtataaaaactagacagaatgattctcagaaactcctttgtgatgtgtgtgttcacctcacagagtttaacctttcttttcatagagcagttagtaaacactctgtttataaagtctgcaagtggatattcagacccctttggggccttcgttggaaacgggatttcttcatattatgctagacagaagaattcccagtaacttccttgtgttgtgtgtgttcaactcacagagttgaactttcatttacacagagcagatttgaaacactctttttgtggaatttgcaagtggagatttcaagcgctttgaggccaaagcagaaaaggaaatatcttcgtttcaaaactagacagaatcattctcagaaactgctctgcgatgtgtgcgttcaactctcagagtttaacttttcttttcattcagcagtttggaaacactctctttgtaaagtctgcacgtggatattttgaccacttagaggccttcgttggaaacgggtttttttcctgtaaggctagacagaagaattcccagtaacttccttgtgttgtgtacattcaactcacagagttgaacgttcccttagacagagcagatttgaaacactctttttgtgcaattggcaagtggtgatttcagccgctttgaggtcaatggtataaaaggaaatatcttcgtataaaaactagacagaatgattctcagaaacttcattgtgatgtgtgcgttcaactcacagagtttaacctttcttttcatagagcagtttggaaacagtctgtttgtaaattctgtaagtggatattctgacatcttgtggccttcgttggaaacgggatttcttcatattctgctagacagaagaattctcagtaacttccttgtgttgtgtgtattcaactcacagagttgaacgatcctttacacagagcagacttgaaacactctttttgtggaatttgcaagtggagatttcagccgctttgaggtcaatagtagaaaaggaaatatcttcgtagaaacactagacagaatgattctcagaaacttctttgtgatgtgtgcgttcaactcacagagtttaacctttcttttcatagagcagttaggaaacactctgtttgtaaagtctgcaagtggatattcagacctctttgaggccttcgttggaaacgggatttcttcatactatgctagtcagaagaattctcagtaacttccttgtgttgtgtgtattcaactcacagagttgaactttcatttacacagagcagatttgaaactctctttttgtggaagttgcaagtggagatttcaagcgctttgaggccaaaggcagaaaaggaaatatcttcgtttcaaaactagacagaatcattctcagaaactgctgcgtgatgtgtgcgttcaactctcagagtttaacttttcttttcattcagcggtttggaaacactctgtttgtaaagtctgcacatggatattttgaccacttagaggccttcgttggaaacgggttttcttcatgtaaggctagacagaagaattcccagtaacttccttgtgttgtgcgcattcaactcacagagttgaacgttcccttagacagagcagatttgaaacactctatttgtgcaatttccaagtgtagatttcaagcgctttaaggtcaacggcagaaaaggaaatatcttcgtttcaaaactagacagaatcattcccacaaactgcgttgtgatgtgttcgtacaactcacagaagtttaacctttctgttcatagagcagttaggaaacactctgtttgtaaagtctgtaagtggatattcagacatcttgtggccttcgttggaaacgggatttcttcatattctgctagacagaagaattctcagtaacttccttgtgttgtgtgtattcaactcacagagttgaacgatcctttacacagagcagacttgaaacactctttttgtggaatttgcaagtggagatatcagccgctttgaggtcaatggtagaaaaggaaatatcttcgtataaaaactagacagagaatgattctcagaaactcctttgtgatgtgtgcgttcagctcacagagtttaacctttctttttatagagcagttcggaaacactctgtttgtaaagtctgcaagtggatattcagacctctttgaggccttcgttggaaacgggatttcttcatattctgctagacagaataattctcagtaacttccttgtgttgtgtgtattcaactcacagagttgaaggatcctttagagagagcaggcttgaaacactctttttgtcgaatttgcaagtggagatttcagccactttgaggtcaatggtagaataggaaatatcttcttatagaacctagacaaaatgattctcagaaacttctttgtgatgtgtgcgttcaactcacagtagttaaaactttcttttcatagagcagttaggaaacactctgtttgtaaagactgcacgtggatattcagacctctttgaggccttcgttggaaacgggtttttttcctgtaaggctagacagaagaattcccagtaactttccttgtgttgtgtacattcaactcacagagttgaacgttcccttagacagagcagatttgaaacactctttttgtgcaattggcaaatggagatttcaagcgctttaaggtcaatggcagaaaaggaaatatcttcgtttccaaactagacagaatcattcccacaaactgcgttgtgatgtgttcgttcaactcacagagtttaacctttctgttcatagagcagttaggaaacactctgtttgtaaagtctgaaagtggatattctgacatcttgtggccttcgttggaaacgggatttcttcatattctgctagacaaaagaattctcagtaactttccttgtgttgtgtgtattcaactcacagagttgaccgatcctttacacagagcagacttgtaacactctttttgtggaatttgcaagtggagatttcagccgctttgaagtcaaaggtagaaaagggaatatcttcctataaaaactagacagaatgattctcagaaactcctttgtgatgtgtgcgttcaacacacagagtttaacctttcttttcatagagcagttaggaaacactctgtttgtaaagtctgcaagtggatattcagacctctttgaggctttcgttggaaacgggatttcttcatattctgctagacagaagaattcccagtaacttccttgtgttgtgtgtgttcaactcacagagttgaactttcatttacacagagcagatttgaaacactctttttgtggaatttgcaagtggagatttcaagggctttgaggccaaaggcagaaaaggaaatgtcttcgtttcaaaactagacagaatgattctcagaaactggtttgtgatgtgtgcgttcaactcacagagtttaacctttcttttcatagagcagttaggaaacactctgtttgtaaagtctgcatgtggatatttggacttctctgaggtcttcgttggaaacgggtttttttcatgtaaggctagacagaagaattctcagtaacttccttgtgttgtgtgtattcaactcacagagttgaacgatcctttacacagagcagacttgaaacactctttttatggaatttgcaagtttagatttcagccgctttgaggtcaatggtagaaaaggaaatatcttcgtataaaaactagacagaatgattctcagaaactcctttgtgatgtgtgcattcaactcacagagtttaacctttcttttcatagagcagttaggaaacactctgtttgtaaagtctgcaattggatattcagacctccttgaggccttcgttggaaaagggatttcttcatattatgctagacagaagaattctcagtaacttccttgtgttgtgtgtattcaactcacagagttgaacgatcctttacacagagcagacttgaaacactctttttgtggaatttgcaagtggagatttcagccgctttgaggtcaatggtagaataagaaatatcttcctatagaaactagacagaaatgattctcagaaactcctttgtgatgtgtgcgttctactcacagagtttaacctttcttttcatagagcagttaggaaacactctgtttgtaaagtctgcaagtggatattcagacatctttgagactttcgttggaaacgggatttcatcatattctgctagacagaagaattctcagtaacttccttgtgttgtgtgtattcaactcacagagttggacgatcctttacacagagcagacttgaaacactctttttgtggcatttgcaagtggagatttcagccgctttgagttcaatggtagaataggaaatatcttcctatagaaactagacagaatcattctcagaaactgctctgcgatgtgtgcgttcaactctcagagtttaacttttcttttcattcagcagtttggaaacactctgtttgtaatgtctgcacgtggatattttgaccacttagaggccgtcgttgcaaacgggtttttttcctgtaaggctagacagaagaattcccagtaacttccttgtgttgtgtacattcaactcacagagttgaacgttcccttagacagagcagatttgaaacactctttttgtgcaattggcaagtggagatttcaagcgctttgaggtcaatggcagaaaaggaaatatcttcctttcaaaactagacagaaatcattcccacaaactgcgttgtgatgtgttcgttcaactcacagaagtttaacctttcttttcatagagcagttaggaaacagtctgtttgtaaattctgtaagtggatattctgacatcttgtggccttcgttggaaacgggatttcttcatattctgctagacagaagaattctcagtaacttccttgtgttgtgtgtattcaactcacagagttgaacgatcctttacacagaacagacttgtaacactctttttgtggaatttgcaagtggagatttcagccactttgaagtcaaaggtagaaaaggaattaacttcctataaaaactagacagaatgattctcagaaacttctttgtgatgtgtgtgttcaactcacagagtttaacctttcttttcatagagcagttaggaaacactctgtttgtaaactctgcaagtggatattcagacctctatgaggccttcgttggaaacgggtttttttcatataaggctagacagaaggattcccagtaacttccttgtgttgtgtgtgttcaactcacagagttgaactttcatttacaaagagcatatttgaaacactctttttgtggaatttgcaagtggagatttcaagcgctttgaggccaaaggcagaaaaggaaatatcttcgtataaaaactagacagaatcattctcagaaactgctctgcgatgtgtgcgttcaactctcagagtttaacttttcttttcattcagcagtttggaaacactctgtttgtaaagtctgcacgtggataatttgaccacttagaggccttccttggaaacgggtttttttcatgtaaggctagacagaagaattcccaggaacttccttgtgttgcgtacattcaactcacacatttgaacgttcccttagacagagtagatttgaaacactctttttgtgcaattggcaagtggtgatttcagccgctttgaggtcaatggtagaaaaggaaatatcttcgtataaaaactagacagaatcattcccacaaactgcgttgtgacgtgttcgttcaactcacagagtttaacctttcttttcatagagcagttaggaaacagtctgtttgtaaattctgtaagaggatattctgacatcttgtggccttcgttggaaacgggatttcttcatattctgctagacagaagaattctcagtaacttccttgtgttgtgtgtattcaactcacagagttgaacgatcctttacacagagcggacttgaaacacacgttttgtggaatttgcaagtggagatttcagccgcgttgaggtcaatggtagaaaaggaaatatcttcgtataaaagctagacagaatgattctcagaaactcctttgtgatgtgtgcgttcaactaacagagtttaacctttcttttcatagagcagttaggaaacactctgtttgtgaagtctgcaagtggatattcagacctctttgaggccttcgttggaaacgggtttttttcatataaggctagacagaagaattcccagtaacttccttgtgttgtgtgtgttcaactcacagagttgaactttcatttacccagagcagatttgaaacactctttttgtggaatttgcaagtggagaattcaagcgctttgaggccaaaggcagaaaaggaaatatcttcgtataaaaactagacagaatcattctcagaaactgctctgcgatgtgtgcgttcaactctcagagtttaacttttcttttcattcagcagtttggaaacactctgtttgtaaagtctgcacgtggataatttgaccacgtagaggccttcgatggaaacgggtttttttcatgtaaggctagacagaagaattctcattaacttccttgtgttgtgtgtattcaactcacacagttgaacgatcctttacacagagtagacttgtaacactctttttgtggaatttgcaagtggagatttcagccgctttgaagtcaaaggtagaaaaggaaatatcttcctataaaaactagacagaatgattctcagaaacttcattgtgatgtgtgcgttcaactcacagagtttaacctttcttttcatagagcagttaggaaacactctgtttgtaaactctgcaagtggatattcagacctctttgaggccttcgttggaaacggggtttcttcatactgtgctagacagaagaattctcagtaacttccttgtgttgtgtgtattcaactcacagagttgaacgatcctttacacagagcggagttgaaacactctttttgtggaatttgcaagtggagatttcagccgcgttgaggtcaatggtagaaaaggaaatatcttcgtataaaaactagacagaatgattctcagaaacttcattgtgatgtgtgcgttcaactcacagagtttaacctttcttttcatagagcagttaggaaacactctgtttgtaaactctgcaagtggatattcagacctctttgaggccttcgttggaaacgggatttcttcatactatgctagacagaagaattctcagtaacttccttgtgttgtgtgtattcaactcacagagttgaacgatcctttacacagagcggacttgaaacactcgttttgtggaatttgcaagtggagatttcagccgcgttgaggtcaatggtagaaaagggaatatcttcgtataaaaactagcacagaatgattctcagaaacttctttgtgatgtgtgcgttcaactcacagagtttaacctttcttttcatagatcagttaggaaacactctgtttgtaaactctgcaagtggatattcaaacctctttgaggccttcgttggaaacgggatttcttcatactatgctagacagaagaattcccagtaacttccttgtgttgtgtgcattcaactcacagagttgaacgttcccttagacagagcagatttgaaacactctatttgtgcaatttgcaagtgtagttttcaagctctttaaggtcaacggcagaaaaggaaatatcttcgtttcaaaactagacagaatcattctcagaaactgctctgcgatgtgtgcgttcaactctcagagtttaacttttcttttcattcagcagtttggaaacactctgtttgtgaagtctgcacgtggataacttgaccacttagaggccttcgttggaaacgggtttttttcatgtaaggctagacagaagtattctcagtaacttccttgtgttgtgtgtattcaactcacagagttgaacgatcctttacacagagcggacttgtaacactctttttgtggaatttgcaagtggagatttcagccgctttgaagtcaaagttagaaaaggaaataacttcctataaaaactagacagaacgattctcagaaactcctttgtgatgtgtgcattcaactcacagagtttaacctttcttttcatagagcagttaggaaacactctgtttgtaaagtgtgcaagtggatattcagacctctttgaggccttcgttggaaacgggatttcttcatattctgctagacagaagaattcccagtaacttccttgtgttgtgtgtgttcaactcacagagttgaactttcatttacacagagcagatttgaaaccctctttttgtggaatttgcaagtggagatttcaagggctttgtggccaaaggcagaaaaggaaatgtcttcgtttcaaaactagacagaatcattctcagaaactgcggcgtgatgtgtgcgttcaactctcagagtttaacttttcttttcattcagcggtttggaaacactctgtttgtaaagactgcacgtggatattttgaccacttagaggccttcgttggaaacgggtttttttcatgtaaggctagacagaagaattcccagtaacttccttgtgttgtgtacattcaactcacagcagttgaacgttcccttagacagagcagatttgaaacactctttttgtgcaattggcaaatggagatttcaagcgctttaaggtcaatggcaggaaaggaaatatcttcgtttcaaaactagacagaatcattcccaaaaactgcgttgtgatgtgttcgttaatctcacagagtttaacctttcttttcatagagcagttaggaaacagtctgtttgtaaattctgtaagtggatattctgacatcttgtggccttcgttggaaacgggatttcttcatattctgctagacagaataattctcagtaacttccttgtgttgtgtgtattcaactcacagagttgaaggatcctttacagagagcaggcttgaaacactctttttgtcgaatttgcaagtggagatttcagccgctttgaggtcaatggtagaatagaaaatatcttcttatagaaactagacagactgattctcagaaactcctttgtgatgtgtgcgttcaactcacagagtttaacctttcttttcatagagcagttaggaaacactctgtttgtaaagtctgcaagtggatattctgacctctttgaggccttcgttggaaacgggattttttcatataaggctagacagaagaattctcagtaacttccttgtgttgtgtgtattcaactgacagagttgaactttcatttcgagagagcagatttgaaacactgtttttgtggaatttgcaagtggagatttcaagcgcattggggccaaaggcagaaaaggaaatatcttcgtataaaaactagacagaatcattctcagaaactgctgcgtgatgtgtgcgttcaactctcagagtttaacttttcttttcattcagcggtttggaaacactctgtttgtaaagtctgcacgttgatattttgaccacttagaggccttcgttggaaacgggtttttttcatgtaaggctagacagaagatttctcagtaacttccttctgttgtgtttattcaactcacagagttgaatgatcctttacacagagcagacttgaaacactctttttgtggaatttgcagttggagatttcagccgctttgaggtcaatggtagaaaagtaaatatcttcgtataaagactagacagaatgattctcagaaactcctttgtgatgtgtgcgttcaactcacagagtttaacctttccgttcatagagcagttaggaaacactctgtttgtaaagtctgcaagtggatattcagacctccttgaggccttcgttggaaacgggatttcttcatattctgctagacagaagaattctcagtaacttccttgtgttgtgtgtattcaactcacagagttgaatgatcctttacacagagcagacttgaaacactctttttgtggaatttgcaagtggagatttcagccgctttgaggtcaatggtagaataggaaatatcttcctatagaaactagacagaatgattctcagaaactcctttgcgatgtgtgcgttcaactcacagagtttaaccgttcttttcatagagcagttaggaaacactctgtttgtaaagcctgcaagggg
